United States Patent Application Publication US 2021/0254182 A1 - sequence listing, part 13

SEQ ID NO: 94 - DNA, 4006126 bp, Phytopthora sojae (residues 2,003,064-4,006,126 of 4,006,126)
  misc_feature (19197)..(19296): n is a, c, g, or t
  misc_feature (23981)..(26996): n is a, c, g, or t
  misc_feature (44733)..(46144): n is a, c, g, or t
  misc_feature (235642)..(235741): n is a, c, g, or t
  misc_feature (275184)..(275283): n is a, c, g, or t
  misc_feature (692136)..(692235): n is a, c, g, or t
  misc_feature (1131161)..(1131260): n is a, c, g, or t
  misc_feature (1187854)..(1187953): n is a, c, g, or t
  misc_feature (1370594)..(1370693): n is a, c, g, or t
  misc_feature (1530312)..(1597116): n is a, c, g, or t
  misc_feature (1649981)..(1650617): n is a, c, g, or t
  misc_feature (1652846)..(1654016): n is a, c, g, or t
  misc_feature (1779910)..(1780009): n is a, c, g, or t
  misc_feature (2043017)..(2043116): n is a, c, g, or t
  misc_feature (2103393)..(2116209): n is a, c, g, or t
  misc_feature (2121198)..(2123954): n is a, c, g, or t
  misc_feature (2151998)..(2169654): n is a, c, g, or t
  misc_feature (2179113)..(2182362): n is a, c, g, or t
  misc_feature (2186034)..(2186373): n is a, c, g, or t
  misc_feature (2446760)..(2446859): n is a, c, g, or t
  misc_feature (2520565)..(2520664): n is a, c, g, or t
  misc_feature (2667156)..(2667255): n is a, c, g, or t
  misc_feature (2706432)..(2706531): n is a, c, g, or t
  misc_feature (2731224)..(2732181): n is a, c, g, or t
  misc_feature (2872659)..(2872758): n is a, c, g, or t
  misc_feature (2897987)..(2898576): n is a, c, g, or t
  misc_feature (2910550)..(2921415): n is a, c, g, or t
  misc_feature (3004392)..(3004491): n is a, c, g, or t
  misc_feature (3075001)..(3075100): n is a, c, g, or t
  misc_feature (3084599)..(3089864): n is a, c, g, or t
  misc_feature (3296472)..(3296474): n is a, c, g, or t
  misc_feature (3296476)..(3296476): n is a, c, g, or t
  misc_feature (3296485)..(3296485): n is a, c, g, or t
  misc_feature (3745077)..(3745176): n is a, c, g, or t
  misc_feature (3748428)..(3748527): n is a, c, g, or t
  misc_feature (3757068)..(3758339): n is a, c, g, or t
  misc_feature (3767198)..(3767297): n is a, c, g, or t
  misc_feature (3775374)..(3775473): n is a, c, g, or t
  misc_feature (3974603)..(3974702): n is a, c, g, or t
  misc_feature (3992146)..(3992245): n is a, c, g, or t
ggccaaaaaggtgccgctgggcacgacgaaatccgtgaaccggccaaagccggagccctgcgccgccagcgccacgtgcagacaccggagccactccttcatctcgctctccgtgtacgcgctgagcagcacgcggcccttcttgccgcgaatggcgaagcgccacatcgtggccgacgagccgtcgaacaccgagtcgcgcggcataatctcgatgctcttgccgctgcacttggccaggtcgatctcgccgcgcttgcggccgtgctcctcgcggaagaaggtcatcttggtgctcgtgagcaccacgaagcgcaccttccagccgcccgagcgcaggccgaagccctgcttaaagagcagcccggacttgatgacgccgccgcgcggcacgttggcggcgcgcaccatgacgctctcgcgcgagagcgtgaagccgtcctcgtccacgatgagcgtgcgcggcagacgcgtcgggtcgcagatgatcgtgtcgatgtcgttgtcgtcgtcctcgctgtccatgcgctcgagcagcgggatggggcccgacgcgggcatggccatgacggccagcagcgactcggcgcggtttaggcggttgctgttgttgacgtagttctccttctcctcgtcctcgtccacggtcgagaccgcgcgcgcgtcgcggttgcgcgccggcgagggcacgtacgtgctgccggcgtcggagctgccggcctcgctgcgctcgtaccagtcgtcgtcgctcatgtcggacgtgcccgtggggcggccgctgctgtcatcgctggggcggccgatggcgcgcagcagctgctgcttgtagatggcgttctggtgctgctgcgtcgagacgcgcagcatgcgcgagggccggaaggccagcaggctggggcgcggcagcagctcctcgccctgcgggtccatgacgggcacctccgggtcgtagccgtcgtagctgtagcggtggtcgtcctgccagccgctggactgcagtaccgcgcgcggggcggcggtggacggcgtggtcggatctctcctcggcgccatcgtcgtctctgtggctaaagtgatgcagtgcccgcgcagcgcagtgcagtgcaatgcagggctgcgccttggtggggaggagcgcggagctgctcgctcgttcgatcaggtttatggttacacacgaactgaacacttgggaacgaggccgagtacgcgaaaaagtgcggtctgcaacagatgctgttcctgtgagaatagatgcgatgaatggacactgcgaggtttattgacatctgtttaacaacatgtacctgccaaaatggatgcagccaccgcactttcacccgtacaaccgcgggcgggccctgccggtcacacagtgggatatttcatgcaagcgacaagagcgagccgctggctcgttagcggtgcttttttaggggtggccgaaagctgagggctgactggtgagaccgcttgccaagcagtgcgactgtggacgagcggccagcgggttgcccccaggcggtgaacggggtgtctccaggctgagggcgccggccgcttcctccagcccaggccgctgccctagaaccagttgccttccatgccgctcggcgggagaatcgactgaaaaaaggcgtcggcagcagccgacaatccaccatcggatcttactgagacgctcaaaaacaaagggctcgtcgtccagtggcctgtggcccgaaacagccgagcggctgggctccgatatacatggcagagacgtctctgctaacggcagcagctcaattacctagcgagcaccagactgttattactgcggcttccggcaacccgcgactcgcggcgcgaccgcgagcgagctccgcttcgcgtgtttgcattcgcgctccattcggatcggaggtggctgaaaaaaaaacaagcggcaaaaactcgattgtcccatcgcgtcgcgcgtgcacaaccatagagcgcggctgcttcgtcgcacgggaccggcaaagtcgctgttggaacgtcctccctcgcaggcgccgatccaaatgcaaacgcccagcactcgcagtgtacatgtaccgcatttggcatgtagagaaacacaccccatgtcataggcttaggttaattactgcactcgagcctaaaaacaatgtaaaatccaaaaactgggtcacgcgatcatttcgtacacaaaattggcaagatggttggtcatgcggatggcgcggagcgatctcctctaggatggcgcttaagctagcaacaagtctaggcgccatctacaactatgttgcacaggaaccacaccacttaaccaattatctacagcgttgctacttctactaccatcgctacagcagccgtgttgtgcgctctctcgagcttgcgcgttgtggttcaacctcgtgctccccatatcccgcactcaagcgcgcctcaactgggcccacacaaggcgtggctactaactatcactccgacgaggcgtatgcctccaagtgcgcggggagggggcagcgcgacgttggcgagctcttcccctctgccttcgcgcacttggaactggtggctcaatgtgcatgcaaaaatgcgcaaaatacccaaattaggggtgtatctctctacatgcgatcccacggacttttctctcgcatctatgattggtctaaaaaaggtgtatctcttaaaccgctgtagcgctctacatgcgaaatgcggtaagttaataagaagtgtgctcgacagtcagtctgtcacgcggctgtaccataatatcggtacgattgtctcattagtcaattcaaatctcgccaatcacaatcctccccgacctattataacgccgcgcgccgcataagtgacagacggatggaggtgagcttcaagaagagcaggcgcgccaacgccggcaggaagcgcgctcggcggccgcaggaggacgcagaggacgcccccgatggcgcaggcgacgccgcggacgtggagcagatccagcgctccatccaggagctgcgcaaggaccagcgcctgcgcgaccagctgctgaaggaagagctggcggcccagaagtcgcggaaggcccaggagacgcccagcaaggcgcccgacaacagtgcgcagtacggcctgcacgaccccaagaaggacggcggctccaccaatcagaagctgctgaccctgctggacggacagttcacgggccagagcgccaccacggacaaggaccagcacgaggagctcatgaaccagttcatcgaggagcggctgcagaagaagaggaagacacagcaggtttcagccaatggggacggagcttccgacgctgcagcggcgctccggaccgcggaggacaagctgttcgagctgccggacaacttgaagccggacgtccccagtagcagcagcgcagggtacgacgatacggccgagggagggatgctcatgggcaacgccggcattgcagaggtggagctgccggcgtcctatgctgaacgcacggagagggcgaccaggacggccctggagcagagcaaagcaggaggcgtgaagagggatgcagtggggggactggccaactcggcgctgccgaccaactttagtgcggacttcaatcgacacaagacggactatgtggcggagatgaagagcctgaacaaaggtaagagtggattgttttgatttgtgtggagaaggagggaatggctaacgaggtgtgatgtggatgttgttggggctgtagatgaacagcgcgagcggggattccgtactggtacgtggtgtcgcgttggaacggagagttgatcgggttgaatctaatactcgtgaatgctgtttgtttgcacagtcggaaagaaccaggctagcgacgatcgcgccgtgtcacggttccgcaagttcgagagtcgcaaactgcgatgataaagcagagtaagcatagcaacaacagtcacatgaactaaatgttttggttagctttccttgcgcacaggctctgacttaccccacggcattagttcccattgctagcgctccaattgcgcttgtagggattgccaaaatgatgctcgtaccacattttcacctccatgtgtcctctgttctgtgctagcgcataaatcgagtcgttgggacagtgatccgttctcgtacggataaactccgaggctcgcaagtcgccacctttggcagcatcaagctcgcaccctggatacaacaagtgttgacgcacgcggggccacaaccacttcaggacatctaagttgtagatacctcctgtccaggccgctttcagcgctttctcagaccaggccttggaaagtttcggggaagaagccaagactttcatcactcgtaagtgtccctgcgaggccgccatctcaaatgctttatcggggcattctttagagcgacgagacagcagccaactcgccatttcgatatgaccccaactcgctgctgcattcaccgcttcgtccgagcacgccatccccagcatcaagtgtagccacttcagcactttcaagtgattgttccgtgctgcttcgtacatggctctgtcggtgcacccatgatcagttctgtgcaggaacttcacgactttgaggtggttttaagctgcagcgtcgaccattgcccgtgctgagcattgatcaatgccgctggagtgaagccaagtcaccatttcgagatatccagctacagcagctgcgtcgatagatccccgcgagattttttcaccgtgcgtatgaagccactgcgcgactttcaggtgattgtgcttcacggcgtcctccatggccttgtcagtgaaaccttctccacgattggcatgcaaaaatgccagtacatgcagatggccattcgaagccgccgagtccatagcagactgcgtacatccttcacgtcgattgccattcaaccacttcacgacctcgaggtgaccgcccgctgcacctccatccatcgccgttgtcgtacatccttccaatcggtttgtgtgcaatcactttacaacttccaggtgtccattctgagctgccaagtccatcgtgcgggtgtcaaagtctccaatttttttagcgtgcagccactttaatacttcgaggtggccgccggatgcagcttgcgatggactgaactcccaatgctcgccaattccgatctcgtaaatccactgaagaaccgctaaatgacctcccagcgccaccttgggcacggaaactttgtacggagctgagcacagtccgtgcaaaagttgcgcagtttccaggtcacctttgaaagcgacagcagccactgcaaccccaacagagtacgcactgcacttcgcgttctctaagagccacttgagcaggtcaatgtgacccgctactgctgcgtcggctacatcatacacgcactcaggatcttccgccaccaaccggtgaacgatgtcgtcccagccctttgtcgaggcgagagaaaatatcctccatctgctccaatgcgcatcgcgaaaagctgcagacggcacgctagcgaacaaccactgaagtgcaggcaagtagcccatctggatcacgccatctatgcaagtgcatgtagtctgatagctggctgcgtcgggataccgctcgtacagcaacttgagcgccgtgagtgcgtcttcctgcaccgtcatctccgtcggcactagttgcatcgcgtatcgatattgttgcagcttctggtggtgaatcaactcattgctgttgtcaactgagtgcagggtcatgagaaacagacgcaagctgttgtgcttcaccgcttcgaccagcgagatgtccgggaacagaaacgcatgcagcagccgcgccacatgacccagaccctccacatccggcgccagccgagtcacaactcgcgcagaagaaaacccattcttcttctccttcttcttcactccagcaaaagagaacagttatcgatcgtattcgtgacagttgaagacttcaacgacggaaaaagtatctgttagccatttcgcaacaaaatggctacagttccccccgcttcagtgacgtttttccatcttctgactctttcaagcggtggtgtagcaatcggccttcgccacgtcacgagcgagtgcagctgcgtatctgtagctctccatcttcgtcggccatttgagctaaagtacctaccatgagctggctctggggcaatgagacgacggagcaggcgcagttcgtggtgagcgcgctgcagagcgagctggacgagcgcgagagcaagatcaaggcgctggaggcggcgctcaagcgcgagcagcaggacctgacggcgttgctggaggacgaggtcaaggagctggaggcgcggcgcaaggccatcgagaaggagctgcagggcgtggacgcgctcatccgcgagaagcagaagatcatccagcgcagcaagagcgacgcgctcaagaacaagaagcagtcggccaagagcaagaagagcaaggcggcagacgtcagctcccccggggctgtagaggagaagccccaggctgcagcagctgctccagtcgctgccagcaacagcaatggagctgccaaggagaaggaggcagtgctgtcgcctagggccaagaagaagcaacagaagaagaagaaggctgccgctgctgctgctaccgagaggtaaggaggagaaacttgatggttctttgtcactgaagaggagaaggctgacggtgattgttattgctttggtgcagtgctgcggatgtggcgggtgcagaggcggctgagtccaaggccattctgccaatggacaagaacttgaagatggtggccaaggaggagccgaatgtggcgtttattatccagcgaagcaatgtgagggggcggttctatttgctggtgtggaaggtgccgggtattgatcggtgcttgtcgtcgtggtgatgttgtagaactcgaatacggtggtgtatgcggggtgcaagtcgtcggacggcaagtcgctggacgcgacgactccgatcaaggtgtactggatcatgtacgagaaggagggcaacccgcgcgaggacctcaacatgattgagcggaacacagcgtatggtgtgacgtccaagccgtcggatgtgccgggcgagcacctggcgagcatcgcgtcactgcgtgatcgcgactgcgtgctttgtctggacaagcacgggaacgtgttagcgctgacgaccattaacggcaagaagggcatggtgctgcggcgcgtgttcgtgcagatgacgacgagctggggcatcccaactgtggactacgtggacatctacggcatggatccgaagacgcacgagcccgtatacgagaagaagaagaacaagtaacaactgtgcgattagagaagagagacaagaggcgagagagccgcggtcgggtatgtgtggaaatgcagtgcttctttcattctttacacgtctacggagtacgagtctaaatggcacggcgcatcatgacgatggccgcggcaccgagcgtcgtgcccagaacgccgcgcagcacgtcctcaggcacgtcctgcgtaatatacttggaggtcacgtacacaccagcagcgagcgagccgccgatgcgagcggcagtgggcaagtggatcgacttggcccgcagattgaacaccgtcgacgacgccgccgtgggcacgacggacagcagcgacgtaccaatgatcgtggcctggggcatgtcgctcgctgccgtcaagtaggacgtgatgaggatgcctcctcccagtccgcagagtcccgagatgaagcccgctgcagcaccagcgaacacgtacttggcgttgaccaatgcgaagccctgccagtcggccttcaccctctccatgtactcggccgagactgcagcggacgtggcagccacggacgggtgagcttcgccctccggcaccgagttccgagccttctccaggtccttctgctgcggcacgaagaactgcaggtccagcgggtcctggccgtcgctccacttgggcatgtacggactgttcttgaggaagatgagcggcgagcacatcagcatggcggagcccacgaccagcgacagcttcttgctcgtgaggcggtgcgcagtgcgcacgccgtacttggtggcgacgatggccggaattgtggtggtgagcgccagcggcacgttgcaggcgcccgactcgaggtagttccaggccccgacggtcgcagcgatggccaccgctcccaaagacgtgccgttgatggcctgctgcgtcagggtggtgaacttggccatcgcctacagttggagagcatcggagagagatggtaatgtgttagataaaaaggaagctgcaagtgagtgtgtgaatgggggagggggtcttaccggaatgaggatgatgcctccgccgacgcccgtgagtgccgagacaacgcccgcgaggccacctatagagaatacagttgtagagcatttgcatgttgcattgatgcagttgcaacagacaagcaaacggttggagaatgtttagagagaggcaaaagtggtgctaactgaccagtggcgacgcccacggagagcgggatggcggcgcttacagtgcgctccttgggtgcagagcacagcacgcggcggctgggcaagttgctgcgctgcgcgtggcgcagcgcggacgcgccggagcggcggagcgtactcgcgagcatcttggagagaagcaaatgagcccgttccggtgccaggttgagcaagcaaaatcggagtcgccaacaaaacctttctttatcggatacttgtagcaaattatattgcctgagtgacggtctctaattattagacttacacttaccttgtataatgtatataatgtagattttgatagggtcaggttcgacactcatcacccattacgccgtttctagtaggcgacgtcaccggcgtgacgcgccgcctgctttacaatattttcattgacacaaaactgcaatccattggcggaagctgttgaagtgcacttttgcaaaaagtggcgacggatgtcacgtcgagaaggttatgatcgagccatgctacgctgggtgttcaccaggaaggcgcaccacggcaaagctgtgattgcgctaattgtgcccgcagaacgaggagcaattgaagcgggaccaccgcaaatggatgctctcgttcttcgagtggctagcagggctttgtgggcgtccctgaacagcctggacacgcgtaagcgtggtgctctgacggaacagcctcacaaatgggagacctatcttttgttgttgaggaggctgtcgattcacgccagagcctctgatctcgcttttagattcttgagccaagtcaagtttcgcgccatcctataatcattgaactgctgggcgaaccgcatcggcaaaagttgggtcactcgaggccggcgttcaagatacttagtacatgttagctcttcaacctctcttggactaataaatagtcctggactatactttgtatgcgtgaactcacattcgcatttcagtcatgttgtcaaggcccgcacgtcgcctgctctcgacgaaggtgtccaggccgctgcagcccgtcacgaagaccgagtcaaagaccaattcagcggccgcacaacaggacgcaggtgccaaggtcaatgaccgctcggacgccaacccgtggagccatttcgccgccttttccagcatggacgactacgtggacgtgactctcatccagtacggaaacgacgagaagaccaacaaagacgacaaggaggaatgacgttcgatgaagaagcacaagacgccgtaatgtacacaactgcacaagttttctttgctgtcttttttttcttcccagaaacaaaatataaaacctattttttcttacctacgccggacgcctaaatgagcatgaccatcgggtcgccgccgtcctggatgtacatgaccttgttctgctcctccagctccaccaagaccttttctaaatcagcgagcggcacagcttccgctctggagcgaccgacgttcagccgcgacaggatgtccgtcagcttgaggctgtcgttctcctcgtccatgttggcgtcgctgcccatctcggccaacacagcgaggacgtcgtccgccagcgtagcagaactgtaacatagatacaaaatacaacggcatcagcacacagtccagcatggtaacaatatcaatggcgttaacgcacctccaagatgtgcggtctcgtttcctggacttctcggccgcagcaggcttcgtcggtgtgacaggagcctcgatcgccatctcctccatagccttctcgctgcccatctccggcatctccggggtctccgttggcctcgttgaaaccggtgcatcgcttgagtgggtctcggtcgcgtcgtggtacagggcgaaactgacgagggccatggccttctccgcgtcgattgcttcgaccgtcttgctcagacgcgccttcgcgtgtgctgaggcgagacgaatcagcgtttccaaactacgagccgtcacgggcagtgtccgtgcgttctgctgggagcgcagctccgcgtaaccttccgagatgagctcgatcgcgccgtccgtcagtacgggctggtagcgcgtcttcgcgtaataaatgtacttcttgaggaaatcaagcgtgaggatgccgttgccgctgccttcgtatgacgaggactggtacccgccgtgcagcagcgggtcgaacttctggaaaatggacttcttcgcttcgcccgagttttcaccattggcgtcgctgagcagcgccatgtgatctgtggagctcacctcgaacgaaaggggaacaccctcctggccgggacgagtatacctgtgcatgcgcagcacgtggtccgagatgttgcggtcagcaccacggtccagacggtcgagcacaacgaacagcaagtcaaaacgcgacagaagcgagtccggcagaccgatgttctcctgaggttttttgttcttgttgtactggccgtagactgggttagcagcagccagcacactgcaacgcgcgttcagagtggcgtggataccagccttggcgatggtcacagtttgctgctccatgacttcgtgaatagccacacgatccgcttcactataatccaatgccaagtcagccatgtacacatgacagggaatgtcttgaagtaagcaaagcgtacctcatcttgtcgaactcatcaatgcacacgatgcctcggtcagccagcaccatagcaccagcctccagacgacgttccttcgtgtcggggtcgatggttacagcagccgtcaaaccgacaccggacgaaccccgacccgtggtgttgacggccagaggcgcgatcgtccggacaaagcgaagcagctgagacttggccgtcgaaggatcacccaccatcaagatctgttcgtcataggaaaactcgagttagcactttaccagcagcctcgccctgtcatcactacccccactcacgttgatatcaccacgaagatgcgtgccgttctcgaggttcttctccacaccacctagcagctgcagcagaagtgcctgtttgatctcagcgtggccgtaaatggacggcgcgatggagcgagacagcatgtcgaacgcgtcctggcgcttagcgaactctcggacgttcacgaggtcgtccgacgacatcacaatgccgttcacctccttgcccatcagctgcacgttgttggcgatcagcaccgtcctgaaaactgcagtcgacgaggccgtgctgttgctgccaagcgggcggtaaatgcccacgacccgaattctgtcaccaggcttgcacttgtccacaatgtcgttctccacaataacctcacacgacctgggcaactgtcccagcggcgccgtctcgggggtttcctgcatgctgatcatctggtagtccttgtactgcgagaggccaaactcggtctcgagcaagttgccgttctcgtccttggtcgggtagacgctggacgtgggtgctcctgtgatagacgtgttgtccctgtactccctggacagaatagcgttcgtctccttgcagtagtgcacggagcgcacgaccttggggcgcacggccgagcacttggtcacgatgccgtgcacgcacaccatctgtgtgaggtacgaggccaggaggcccctcgggttgacgttgtggtggccgaagtcgccctcgaagcccacgtggaactgcatgtccttggtgttctccgcctccttgctgccgtacatgctgtccatgttgaagacgagctccttgacggcctcctcgaagggcggcacgaactcggccgggttgcgcagcaggcggttcacgatgttgtcctgcgcgcccacggccgcgtccgtgaacgagccgtcgtactcgcgcaggtcgttcaggtccacgacgagccgcgtgctcttgtggtgcatcatgctgcgcagcttctccgagtagttgccatagcccgcctgcacaggtttgtgacacaagtttgtttttagtcgcactatttatttggcagggacaaatcggtgcgagcatagcagcccacgcacgtcgctctccaggaaggtctggaagtactgcttgtggcggcggaaggcctcgtccagcgcgtcctgctgcagctccatggcgtccgtccgggtgctcgcgcttcgctcttgccgcgcgcgcgaatttcgagtggccctctccctgtttcaaaaccgggcagtgtatcggggggatcggaagtgtgacctaatgcgcgctgattggctagagctggaattcgaatttgaatttgatgttcccgccaatcgcgtttgacttggagaatgtatggagatctaattttggggcagatggtgcggaacaggcttgacgtggactattttgaaagctgcgacgtgtgaggagatggctacatgctacatgacggcgcagacctcggacgtgacccgcaccacgtgcttcttgacgaacaggtagttgtgcggacgctcgtcttccagcgccttcttcttgcgctgcaggtcggcgatctcctcgcgcagtttcaaccgctcttcgtcgccgagacgcgccatgcgctccagctcgctgttgatctcgacgagctccgccacctcgccgcgatgccgcttcacggtgctgcagatccacagcaccagcttcgtgttgctacgcagcgactcggggatgtccgtcagtccgtcgttgccctcgcaacacacttcttccagcaccgggcagtcgcacaaagtgtgaggcagcagagtgagcttgttgtggcgcacattgagcacgcgcaggtgttgcagtcgtcccagctctggcggtactgtagtgaggtcgttgtaggacacgtcgagctcctctagacgctcgcagtattgcagctcgttgggcaactcctcgaggcggttgcggtgcagatcaagcttgcgcagatttacgcatcgagcgatctgcacggggatggaggcgatcctgttgttggccagtatgagttcgcggagaagcacgaggttgccgaccgcctcggagatgtgcacgagctgattccgggacacattgagcaccagcaacgagtgcgcgtacgtccacaccacctcgtccagcgtcacccagtgcttgtcctgcaagtccaagattccgttttcgtcgggtatcagcgacgcatcgacaagctcctccatggtgctcgctcaagtgatgaggttcgatgctgcattcatggatgtagcaggtcttgggggcatcgcaacaagaatagcaacaagcagtttcagcttcactccaccccaaaggcagatatgagcagttgtgtttgttgctgtgcaatcgagtgccattagcaggcagcgcatactgaggtgatctaatacgcccacaagaaatggcgtgcaacatgtttttatatatacttatgtatgtaagtatgtcgcactgtaaagggtggatggctacaccgatcttcctcgaatctgaggatctcatatgctgaagttgaagtgactcactgcatgaagatcaaagatcacaactcatactcaatgcataagttcgcaatactacatactagtatgatagcaactcaacgcactgcacaaaatggccgatgaagtgctcgtcgctacagaatcctcgacaccgccgtgaacttcagcgggcccgccactgaagttacggccatatggctttggcgcagtggttgagctcgttcgctgaaacttgccagcagtgcaatcatcttcccagaccatattccgtttcatttcgctggcaccttgagtgtggagatccccagcaaaaatcgactatccgtcgcgtctcaccgggaatcgagtgcacaatcgcgtattttggcagatcccaagtgactgcagtctgttctgcctgagtcgaatggcgctcgaaagaacaagaagcccctactcgatcgcgtgggcttcggagtaagacagtagaagctgcgatgtggcccatggctttggaatcgagcgacagcagaaaggagcaagcgcttcgcttcaccaagaaacggacaacgctttcgcaatgaagctcgaacaggatatttggttcctgcttcgggcttcatgctggccaagcaactcggtggttattgccttccctcagccattgttccatttgccaactacagctcaacaccgtttaaccagcaaaccggaactgcgttgaagctgcaacacaatgttcagcaaaatcctacgctcgcgtctcgtgcttgccgccatgtcctgcgctgctctcgctttgtcgtcttcgatgggtttagctgctgccgaagagctgtgctcagtcgtcccgtacacgtatggtctggccaagtcaagttatccgcagctctcaacagctctgggtacgctggagaactacgccattgcctcgtggttcacggaccgaatttcgactcaagatcgagccaacttgatgtatcgcatgctgaacgaatgccccgacgagtctcgactcagtatcgtggtctacggtatccccaacaaggattgctcaggtggctactcgacatcggggagtgtgacgagctcagccgcgtatcgatcgttcctgaaagagctaacggacgccgttggcgatcgcaaggtgctgtatgtcgtggaacccgatgccgtcggcctgctatcgcaagacaacggatgcggtgggccggcgggttacctcgaaaacctcaaaatcgcagtcaacgcattgtccgcgaatgccaacgctcagctgtacctcgacgtcggatactggatgctggccgacaccaccaatgccgccaaggttgcgactgtgatgcagcagctcggcagcgctgggcgcgtcaaaggtgtcaccatcaacacgtccaattatcgctccaacgcagagtgcgcggggtactgctcgaccttccagagagctatgggctccgatgacatgcactgcatcgtagacacgtccagaaactacaacggttcgcccacgaccgactggtgcaacatcccgactgcaggcatcggcaagccgccgacgtccaacacgggctacgctaacctggactacttcatgtggatcaagcctcctggagagagcgacggctattgctggggtgggccttccgcgggatcgttcttcctggatggcttcacattgttgtggaaccagggctactttgtgaaggaaatgggcatgccgataattggagagaccttcgcccctacatcagcaccgacttctgccccaactttggctccgacagcagcaccaacatcggagccagtgacttggactccgtcgtatacaaccgccccggtgacttacgcaccggataccaccgctccaaccacggctccagtgacatggtcctatggtaccggcgcatgcaggaccaggaagcgcatgcgctcgtaacttaggctgcatttcgttcgtcctggttcaagtcaagtccagtccagcaacaccaccacaaattcattcacatcatttcaaaactttttgtccgtgagttttccgaatgcattgcctccgtcgagcagccaagcttgatacgtacgcacgccacccactggacacgaacgcgatcagagcatgcgagaatgaatttgaatcgatgttcacactctctagtcagtacaagatgtggaaatgaagacacgttctacaccttctaagccaaccacgtgaccttctcggcaatgggcttgcgcgcgcccttggcgatcttggcgccctccttgggcacgccgacgtagaacagacccagacacttgtcctcctcgccgaggctcaggtggtccttcatctcctgcgacatggtgatcggcgggcctgagctccagtaggcgccgacgttgtgcgcggtggccacgaggtgcatgttctgcacggcgcaggccacggagcacatctcctcccactcggggatcttgccgctcttctggcgcttcatgcagatggcgatgacgtgcgaggaggccgtgcagttgaagaccatcttcttgtacttggtctcgaggaacttgtcggccggcaccttgctcttgtacacgcccgcgagcagctcgccgagctccaggcgcttctcgggggactcgaacaccacgaagcgccagggctccgtgcggccgtgcgtgggcgcccagttggcgctctccagcatcttgtcgagcaccgcgcgcggcacctggcgcgagctgtcgtagtcgggcgggaagatgctgcggcgctcggcgatgagctcctcggccgtccagagcttgtcgccgctggcgttgcgcaccgtcgtctttgtcacggtcttgaccgtcttcttgccggccgcggaggccgccagctctacgcgcagcttcagcgcgtagagcgcgaggccgacggtggaggccgaagatacaattgcgagcgtcgtggcggtctccggcatctttaagggagtgcgcggcacagggtgaaacggaaagtgagccagccacaggtccagatgcgcctgacgtagcgggaatgatggtcgttcggtggcggggagtattcgtcaggaggctactgccacagatgattactcgcagtaaactaacttactctagtagatatttagccagaggcttgagatcatgctattaataccgacttcctccgcttgtagtggacaacctcatataagagcgtccaatcatatcacaggatttggagggtctcctcgactccgcttataagttccgcacaaatcatatcgatacgtttccaccggtaatatatcggtgcgatggagcttccattcatttcacgcagctacggctgtagtctagagctacctggacgcggttgatgccagtacccactacctatgctggtgttaagcgctgctgcggcacacgtatactatacagacgttcggagagtggtttgcttgcctcatccttacttacacgatgctgttcccatcgaccaatgacacatgttaccgagttagactttaataaaaagtttacctcaaaaatggtctgaaggcagggcaaaccattgcaacggcactagcctcacgcgggcgcgtggcgctcaaagctttgcagtggcagcctgttgcctgccgcgaggtgtcaagcgcgacaggctcgctcaggcgggtagcggcgttgtgcatgaccaccaataaagtgagcaaagcgcaaaaaagtggcagctaatcgactacttgtactggtaccggttgccagattcggcatatcatttttgacgagtggtacattgtaccggtatataccctgtccactataagcggaggaagtcggtaatggtctgatctacttactggtacgttttgaaaattccccccccccaatcaagtacccggcagacgagagaaagctgttgtcggagatgccaagttctcatcgagctaggaactggaccgaaatgaagtgggctcccatgcttgacatgcaagcacactacgttcccgacgcgcagtagcattcacgacaatttgtacagctgctgaattaacctgtctttttaggctttttagattaaaacgagcactactggcagcgcgccaagcaccagcgcccaacttacttccctgggactcactcgatggatactcgccatcggctgccgagacgagagctcgaaactcgttcggtgttgcttcggaagcgcgccggtcacagcttgactaaacatccgcacaaatgaagccttaccactcttcccttccgccgcaagagagacaccaccactgtcaaggcagaggaaggacgcactctgcttaaaaccaagcacagcttttaagagatgtcgcgcttgtcagtacatgtaatacatttcatacgtttctacttgatttgattagctcatcgtctgaaatccggtgattgctaaacccgccactgactggtgtacgccacaccgccgacacgcttcttcgtctacaattggctgaacggcgaaccgccgacttgatcatgctcgccgcacaagcccaggcggcgctgcgtcgcgcccgccacgtcgcccctcgcgcactctcgtcgctctctgcgtcgccctctctacagcttctctcctcctcctcctcctcctcctcctcacagtggagcagccgccgccagaatccctcgccagcctggcttcttgcagcttcagccgctggactggcagcgaccgccgcactatgcgagcagacgccggaggatgacgatgcagcccccgttgccgctggggaggtgcgaaacgacctgccgacgttcggcttcgaggaggtgcagaggcacacgggcgccaaccgcaacggcacgtgggtcgtgtacaagaacggcgtgtacaacatcaccaagttcatcgcggctcatccgggcggcaccaagatcctgctggctgcaggcaattccattgagcccttctggcagctctacgcggcgcacaaccacgcagacgtacacaagatcctggagaagctgcgcatcggaaacctccgagcggaggacgtggagatgctcgaggcgctgcgcaaggaacggtacggcgacgggccgtacagcaaggacccgacgcggcacccggcgctcaaggtgaactcgagcatgccgttcaatgccgagccgccgtcggagctgctcatgcagtcgtttatcacaccgaacgacttgttcttcgtgcggaaccatttgccagtgccggacgtggatgcggagaactttacgctgaagatttccgggttggggatcggtaaaaacaagcaggtcgagtacacactggatgaactcaagagcaagttcaagcaccacacagtgacgacgacgatccagtgcgctggcaatcggcgtgcggagatgtcgggcgtgaagcaggtgaatggactgagttgggacaccacggcgctctcgacagcgaactggacgggcgtgctgctgtcagacgtgctagcaagtatcggcgtcactgacgaggattcgcgagagggacagtgtgactgcgaggtgggggagaacattggcacatgtgatgactgcaacgccgttatccagcacgtgcagtttgaaggactagactgtgacactgaagggaaaacgtacggtgcctcgatccccgtcgctacggcactagacccgcggaaggacgtgctgctggcgttcgagatgaacggtgaaaccatcccgcgtgaccacggctacccgttgcgtgttatcgtgcctggtactgttggagctcgaaacgtgaaatttctgcaccgtatcgtgctctcaagcgaggaaagccccagcttttggcagcagcgcgactacaagggcttcccgcccaacgttgactacacccgcgatgacttctggaaatttgctggtgattctattcaagagctgcctgtgcagtctgcgattacagagcccaagaacgactccgtgcattttgtggacgatgctacagacagttcgattgtggctgtaaagggctacgcttggagtggaggtggtcgcaatattattcgcgtggatatttcagtggacggtggcaagacgtggacacccgcggagctgcacgagtctggaaagcgtcagaagtacaaccgtgcttgggcgtggactccgtgggagctggacgtggaagttccgccaggtacaaagaagttggatatcttgtgcaaggctgtggatgcttcctacaatgtgcagcctgacactattgcccccatctggaacatgcgcggcgtactcaacaacgcctggcaccgcgtgcacgtctcagtggaggagtcggaagaagaagaagaagaggaagaagaagaagaggagaaagaagactaaagtgatggggttattgcgaacttacacatgtaaaatctttctcataacgcaatgcaaacgtcatatatcttcgggtcttgctaatgcttggggtaaagcactccacgcacggtcttgagcatgatgtcagaccattgtgcaatcgtctcgcgcagatcctcgaagtgaggagtagaaagtgggaactcgggccgatacaccttgtagaacgcagcacgcctcatcgtgacaactacgccgtctagcggatcgtttatctgacgtttgttagccgtgagcacaactgctgccgagatatccttgcgaacacgctgggggctgtaggggtacttttcatcttcattgaccgagtccgagacaataacagcacagggttctccaccatacccttcattcccatcaagcatcgctcgaaacgacactacgttgccttctgtcgtgattccatgctcgtttgtcgagatgattcgggtgtggaaagctgcatccccaatagcatcatagtcttcgcgcagcgtgatgtggcacaactcctcggagacgatgatttccatgttgttcttgtaaaacgacagcgcgtcataaacttgctgaagcgacttgactccagggaactggatcgtgtcgaatcgaacgctgcacaagtcgccgtgctggttttcgaactggttctgggagaactgcctcttcatcggatcgttcacccgtccagggcccacgatgaactccaacgcagctcgaatcttgacgtccctcaaggccaacaacgtcgcacgtcgctccgcccagtccttcgtcagactgatgcgactgtagagtgggtagtgctgctggtccgtcagacactgggccagcgccgactgcatcttggcgacgtgcagctgctgcgtgcgcgtcgcgtacagcagcgccgagtactcggcagccaccggccgcagcactgggtccctctgcagcgccacttggggcgacgcgcgcctcatcttgagcacggccacgccggactccaacagccggatctcctcctccagttgctcctagcagtaaaatacttttagtatctgtttcatctttagttttgaacccccggaagagcgctctcttaccttccggtcggcgtggctgagtttccgcctcttgtcggacttgagggctcgcgcaggagacgagtcggggctcaactggtccacgcggttcagcccattcacagccgccaacgtttccccagtcaaattcgagacacgaagtagtcagccctaatagaagccccgatgtcgctgccaaggtatctgcgctcgattggagctcctcgccaagcttgtcgagcattgcactcggacgtcttcttctatcgctgggaagcggcgctggctgctaccgacgctctcgactgctgggattgctgccatcgctgctgtgacgctgcgcgatgacgaggaagttgtcagagcgggggaggtggagccccaactgccgacgtattccatgcagcaggtgcagtagcactccaagagctccagggcgtgggtggtgtacaggcacggagtctacgacgttacggagttcgcaggggcccacccaggaggtaacaagattctgcgggcgacggggaagtccctggagctcttctggcagcaatcggagccccattcgcgagcgggcgtcccggagacgctggaggagctgagggtgggcaatttgagcgaagaagactttgacaggctcgaagagctgaagaaattgccctcgactagtgacaaggagtgtgcgatgagagaggtcttcttttttgaaggttcttcggtgccggaggtgaatttggaggggtttgagctgagggtctgccgggtgaaggagacctcgctgtcgctggcggaactcaagacgcgcttcaagctgcacagcgttaccacgacgatccgctgtgctacgtctcgcgctactgctggctctggagacaagcagtccacaacgactgtgcgagttcccgctgagtggacgggtgtgctgcttgccgacgtgctggcgtatgtagggacagcagcggcatacattgaacaggtacgttttgaggcgctggatacagatgccaaggggaaagcgtttggcgcctccataccggcgacgacggctttggatcgagaagttggcgtactgctcgcgttcgagatgaatggcgctccgattcccaaagagcacggcttcccgcttcgcgtcgttgttccaggaacgacgggcgcgcgcaatatcaaattcgtccatcgcatcatcctcacgtgagggcggtccgaggcccggtcaagtcagagacaacgaagctggatgaacaggttgttggctctcacgagtgagttgcgttcgtgttttgattgaaccttgcagatgttgaacgagagctgcttcgagaccatgaggcacgccccccccttcagttttggtgtctctggcgcaattgtgtcatcctgacaacgacagacagcggaatgactcccccggtggtgttaattgagaacggagctcacacttttcggctactgtacatgtagcagttgctcttttagctcagcagtggtttcaataagctcacgggtgcttgatggaaatactcgtacattggtacagtcggtgttctcacgagagttctcggtctcgagccgtgaacgactcgactccaccgaaccggctgtgatggtgcacatccgagtacgaatcctccgcctcgccacctgcgcgcttccgaccgcttcgtcctgaaattaatgtatggggtcacgcccaagatgcggggattgtgatcagctcagccgcgtgatcccctgacgcgtgcgtaatatgcggtgtccgaatcaagaaccgtgccatttcccattctgcgtcgagctgcagacgcgctggtcgcttggactcgactcgactactgaaggcaccgatgctgacgattcgatcgctcgcggcgtcggctctcgcctgcgctctgctgtccgtgagcccgtcgcaggtcgctgctgactacacggtcaaggccgacgctgccacgaccgtgcagggttcttgggacgggtggggcacctcgctttgctggtgggccaatgtcttcggagagcgcgcggacatcgccgacgccctcttcacgctgaacgagacggtgacgctggacggtgcgacgtccggcatccccggtttgggcttcaacatcgcgcgctacaacatcggcggctcgagcagcaacgtcgtggacgacagcggcactgaagtggcgatgaagacctccgggaacatgcctgcgttcaagttcatggagagtttctggctcgactggatgagcaaggaccccacgtccacgagctggaactggaaggccgacgccaagcagcgtgccatgctatcgctcgccaaccagcgcggcgccaatgtgctggaagcgttctccaactcgccgccttggtggatgaccaacaaccgcgcgacggccggtggagatgacggaaagaaggataacctgcaggactggaaccacgacgagttcgtgctgtacctggccacggtggtgagccgcgccaagtcggactggggcatcaagttcacgttcgtggagccgttcaacgagccgtctgagacctggtggcagtacccgggcaagcaggagggctgccacttctcggtcgacacccagaacgctattctgccgctgttgcgtaagcagctcgatgcccttgacctgcaggacgtggctatcgcaacctcggacgagaactccgctacggagacacttgcgacgctcaccaccatgtcgaccaacgccgatgttatgggagccattgagaaggtgaacacacacggttaccaaggacttgaggcgtaccgtggcccggaccgcgggcctctgaaggacctcgccaacaagctcaccaagagcctgtgggactccgagtacggcgagagcgacgggacgggactgaccatggccgagtccatcggcctcgacatcaacgagatgggcgtggcgggcttcgtgtactggcaggcgctggacagcggcggctggggcctcatccagtccaacccgggcgacaactggatcggcacgcccaaccccaagtactacgtgctggcgcagtactcgcgccacatccgccccttcatgagcatcctcgcttcggacgacgccaagacggtgctgggctacgactcggagaagaagctgctggtggtcgtgacggtcaacacgggcgacgcgcagacgatcacgttcgacctggcgagcttcgcgacagtggccggaccgatcaacgcctggacgacggagacgagcggcaagggggcgatctacaaggccagcaccgtcaagctctcgggcacctcgttcagcgccgccttccctgcggcctcggtcatgacgttcgagatcgagggcgtcacgctcgctgcttagttcggatatatatatggatagtggacgtaaactgctggtcaattaaaaccatggtgaacccagacaataccgtaagctgaagttacgtcttctctgattcgccaatcggcaccaattttagtccaatcctgctgcctcgttttgattggcaaggcgtcaatcgtgcggttgtcatggcgagtgctcgaggtgtcgccaacaccgtcttcaggatgcaactacgcggccgcaagcgcgatttcgcttcatctgctgcggtgaccaccagtagcagcgcttcaagtactacagccgagaagaagagagccgtaaaggccaaaacggcgtctctaggggcgaaatccgctgggacgaaggtggaagtaattgcgccgtccagttccaagttcccagtgctgtcagcgttgacggagcgagtgaatcaaagctcaagtgactctaaaattctgctggagtactcaaagctggttccggcgcggctaattcgacgctacaagcgcttcctggctgatgtcgtgctgctggatggaggtgtcaaggacgacagtaccaaggcagtgacagaggccgaggaacaggaagaagcggtggtgactgtgtactgcccgaacacgggacctatggtggggctattggacggactaccgaacgctcgggtgcagctgtccaagagcgacgaccccaagcgcaagtacgcgtacacgctcgagatgatccagatcgatgtgcgtaacgttgctgctgtgagctgttaatcgtgggtgggtatttacagtaagctaacgctgtattttctgatggaatggggtagaacggagagcgatacgtttgggttggtgtgcactctacttctgcgaaccgaatggtagagcaggcgctggcatcgcggtggtttactgagcttggacactatgattcagttcgtcgcgaggtgaagtttgccaagaacagtcgcgtggacttcgtgttgaccacaaacgctgaggatggcagtgtcgctcatgaaaagtacgtggaggtgaaaagtgtcacgttggcactcgaaggaactggggacgaggacgcgtctcgctgcgctgtgtttcccgatacggtgtcaactcgtgcacaaaagcacgtcactgagctgactgagctgctgtccgctaaggtcaagtctgacaaacccaagaaggggtccaagaaggagaatactgaggctacagcagccaagctgagtggagctatcatattcttggttcagcgcgacgactgcagcgagttcgctccttctatccaacacgacaagaagttcgcagagctgtgctccgtggcagccaagagtggaattcaactactggggtattcgtgcgcattgaagcctgatgaagcgaatagttctggggctgtatccctgctagggccactaccgctgcaaaaagctgcgccgtagcatgtacgaagtagaattttatgagtatgcagtagcatacctataaaggacacggtgcttccaggcgaaggcaaacgcgcaagatacgttttactagcagtagcatagggccttgccgatgctgattgcagtggaggacaatttcgttcgatatatgctagggagcctgaggcatgactacgccgacaaggagccaatgataactattttgaagtgttgaagctggatacatgtaagtctgtgtctgggcagtatatatggtattctcagtttaaggcgttgcgtacacgatgtttcgaatgctcttgaccattacgtcagtccactgcatcatgtcatcgtgcagctcttccagcgcgagttgagaaagcgagaactcgggccggcgtattttcaaaaaggtagcgcgccgcatcgtgacaaccagtttctcctgaaatccacttgcttccatgcctttgcgtgcgtcgctcgtttgccttttgctagccgtcagtataattgcacctgatgaatcccttcgaacgcgctcacttgagcgatagggatacagttcgtcctcatcgacgcagtcgattatagcgatgccgcaaggctcacccccgtattcggcatcgtcttcactgaacatgtgtcgaaaggagatagcgttgccctccactgcaatgccgcggttgtttgtagaaacaaatcggctatggaacgcttcgtcgtcgatagtttcgtagtcatcgcgtagcatgacgtggccgagctgctcggaaattatgatctccatactggtcatgaagaatgataacgcgtcgaaaacttactggatcgagatgacgccgggaaattgaaccatgtcgaagcgaatacagcacaggtcgccttcctcattctcgaaccgcctctcggaaaattgcgttgagctatgacaaactcgtacgcgcggcgaagtttatcgtcttgcatccccaagagggtcgagcgtcgctcgctccagtccctagataaacagatccggctgtggagaggatagtaaggttggtcgatctgtttgccaacatttcaccgagcgagtcacgttaccagaagtgaataaggctgagtgtgataaaagtatcaagcactcaccaatgctcgcgacaaagcggactgcatcttcgccacatgaagctgctgggcctggtttgcgtaccggaggacagctagttcttgagcaaggggccgaagaatggggtctctctccaccactaaatgcgcagggaggttctgagtccgcagtagtgccgcgcgagactccaacaagcgaatctccattccaagatgttcctgtagtggcaaacagttgacgaagtttagcagtagcaccgctgaaggcgcgtacgttagtacagccgcacctttagctcagcatggttcagcttgcgcctcttcttagagctgaggcccctggcaccagtcctcgggcgattgctggcggtgctaagcatccttttttcgtacgggtgaaggttatgttgaaaggttacgaatgctgaagcccgtgaagcggaacgcgactgccagaagcgtggcatcggccaatgatagccagagaaagaacaagtgacttggagaacttcgtgaagaagcccacaatatcatttagaaccaaactcagcttcccactcctcaaatcgacgaagttggtcgtggcccacagacttgcaaacattgctcaaagcctccgcaaagtccgcctgcatgaacaggaacttgtgaggtttcacggccatgttgtatcttagcacacagagtaagaacacccaccttggtgactacaagtcgttcagtctcaagctcacgaaaatcttcacccgcttccatatcacgccgcatttttagaagtagctctggcgtatatactcgtttcacaggcattcgcttggctagaataccggccagatcgacattgtcagaccctcagctaatgacatgtgagtccaggtcgagcgtacctgtttcgcagacgttcgtgatatcgtctccgctatagccctgaaaagcatcatagtgaaacatatattgtaagcaagaggaagtcgtgcacagtttacgctacgcttacctcagtttcatccacgagctcgtccaggctcacatctggacccacgtcaattttccccatgttaagctgaaaaagagctcgacgtgcctcagcttcgggaagcggtatatacactcgctttgttagtcgtcgtcgcatggcttcatccaattcccacgggaggttggtggccgccaaaagcatcactcgactgccctcgtgctccccagacgaaacgccgttgatttgaaccagcaactccgtcttgaccctgatcgggcaccaaacgtccgttagcagaagcaaaatttgtttccgaaaggtaaaacagaacacgcaccttcggctggcttcgtgttcggttgctgcacctctagctgacgcgattgcatcaatctcatccatgaagatgatcgagggttcgtagtagcgagccatgtcgaacaggattcgaaccattttttcggagtcacctcgatacttggatgaaagtgtcgaggcggacacattgaaaaatgtcgtcccacattcgtgtgcgacagcctgcagtgaaatacgtttgcatggttagccatcagttcgtcggcaataattctcaataagtcgcttaccttagctagcagcgtttttcccgttcctggtgggccaaacattagcaccccgttgcaaggcttaagaagtccatcctgtacagcaacgatagtttagcccatctatcggcacacataattccgcagttaatgacgtaccgtgaagaggtgaggcgcgatctgcggaagcatgacagtttcttgcagtagctgcttcgtatgctcaagccctgcgatattctcgaacgtgatcttctccccgtgatcgacaatatcccgttcgatagcttcaataagctctcgatccacccagtcattctctttggcgagctcggagtacttaacttttcccgcaatggtctctaggcccgactcgttgttgctcgagcttgctgtactttgaacactctcacgacgcttagaagatcgcggaccttgtcctgtttttcgctgtttcgcatctgcgcttgacatcggcgaatcgccactccgtttcgcaccattccgcggcttattttctgcccaaacatgcaaatattaattcccccatacttctatctactagcgaagcaatgttacggccaaccaatataaaccctcttcgttctcgtcgatgccgaagcactcttgcgagattgctgcaattgccgtgctctaaatatgacaagcacgccaagtcaattcggacaatcatgttgacaactcaataatacactcatatcatacctcacgaccgtcgtagcgcgcggctccccacggtgcatccataacggcacctgccgctcccttactctgtgtccaatgccggcagttggcacagcgtgttcagcccttgaccgccgcgccgcttggggcttctcccactacccccaacaacatttaccacattgacgcattagcaacagccctgcaactatatcagttctctagtgacccacacgcaccctcttggtgggcactggttctgtggcgatggtcccggccgtattctcctcttgctgctggcgccgcttcctctccctcgcggccctgctgcgtctctgcgagtcctgcaccttgttcgcggcaagtgtcagatcctgcagcgtactgcgatactcgaggatcgcgcggtactcgcgctgcaggtccttcagaaactaaatgcatggtgttagtgggcaaatttttagcgctatgagcccagattgagtcgcacctcgcgcgcctcgggatctccatggagctgtgtctccagcgtcttccgcacggcgcggaactccgggatgccccgatcgtagtcgcccagcaagcacagctcccgcgcgcgcagcagcgcgtattgcgcactcttggccgatgccgccatgttgctcgccatcttgaaatgcaacagtgatcatcactcttctggcgccaatgcacatgattggccaatacaaaagtctcttttcagcgaatcgtatgtacgattactacaactgagcgatgtaccgctttaaccggtacatcgctctcgaggctgacacgtagcggggcataggacgtcactcgacagaacgtcgaccggcaggagagagagacacagagaccccgccatacacacacagacacagtagcgcagccatggtggagcttacggacctgcagattgtggccatcgcggtgacgggcgtgacgctggtgctgctggcgatggcggcgcgcgtgctgctgccgagcaagacagacgaggtggacgagtcgctgcaggccatgatcaacggcttcgacttcgcgctgcccgaggaggtggagcagtaccgcaagggcaaggaggagcacccggaggacacggacaagtgcttccagctgctgttccgccgcgccgtggccgacatcccgctcatccgcaagatccagtcggagagctcgggcatccagcgcctcaagaagaacgacatcctcaaggacggctcctacctcagctacaagctggccgaggagatgatcaacgacgagatcaacgaagtgcgcagggaagccgaggagctcaagccgggtaagcctttacccccttgtcttggtcaattgtatgtcgccgattgctgactcgttgttattgctgttgtgcttgttgctgcaggcgagggctggcccgacaagatcttcccccaggccgtgcagtgtatgaaccagatcgctgagcagcaaatggcggcgcagcgcaaggcggcggaggcacagatgagggccatgcaggctgcgcgcgagaaggccatggcacaggcggaggctgctcaggccgctgtccagaacatcgaggcgcaggtagcagcgaaggagagcgaggaggagacgctgcggaagaggaagtagaagtgtcaaggggtccggacgcccgtagcattctggataaaagcccctttgggtttggccttcacctgcttcgccgctcgctccgctttgtgagatagacagtttcgtttgattcaaatggtgtcgatgttgcattctattgagtgtctttaagtgtcgttagtggctgcggacgccgccatttgcagcgcatggtcgacgctggcgatgtgttgcagtgtggcagattggagctctcgcactgcagccagcgacagcgccagcgttgggcctttcatatcttctatctgctcatggtctttttgaacggtaacagccttcgtctgctgcggcaactcaagttggctgttcatgccgcagcgcacgctgatccgctgtagttctcgcgagacaattgcctgtgcttcttgccgcttggtgtggcgtagcatacgctcctcttgcgacgcaaaggcccagtcgccgaactccagcgctcggtagatgtacggacgatgccgcagtggtgctgacgccaacgtcgtctgaaccgagctcccgtcagcaaaaaagaacgagcaacagtcgccgtcgcgttcaacctggaggatcgtgcgatctgcaaaggcaacgcgaacgcggccatcacggaatgcacgaaatcgcccgtgctcgttttcagactcctccaccagccccagttcatccgtctccaacgatgacgacggaagatcgtgaccacgagcttcagcagcgtacttgaaggcttgaagcacgtagtcgatgtgttggcaaagcgcatccacagagtgactcgtgcccttgttgtcgatggtggacggcggaggaatcgtttcacgcgtgaaccggtgctgaggtcgtcctatttcatcataccacgtgtaaaacccatcgcaccccaccagcaatgatcgctcacagttcagttgaacctgctcaccaaacaataagcacccgttagagtcaaacaccgacaactacgtctagacatcgtagatcccaagcgtaccacaaattccggaagtgaattcccctgcctgcgtgacacaagcaacgttgcatcctcccccacgacctccgccacaacacgatggtacaggaacttagagggcagcgtagccactcgcaatatctcggccaaagccaaaccacttgcctgctctcctccatctcccacaacgccgtcgttactcgtagccatgatgggaaacgctggtcgagcagcgaacgcgccattcccgggcaattgcgacacagatccattcacgccgtcctccgaatccccacctacaaactcaatctctgcttcacggtcattatcccacgctgctttcgccgccagtaacgtcctcaccggcagctcaaagctctgcggcgtctgacccaccgcgaacgtccgatgcagcgtagcgtaatgagcgtggctgctgtcctccacttggtcgtccgagaccttcacttccaccacataatagagatccaccagcttcccactggcttgcactcgcactttagccgcgccctctatcgactgcatctcgaagcacttctcctgctcgttgtacagcttcgacactttgagcttccctcctgacgctggccacctggctcgaggcgctcggatgcgacgctgccgcctcacgtcttttgcttgcattaactgtacatgcagatacggcggctggtccgtgaaccggttgcgctggttgagtgtgtcgaccaccatcggacggtgactggacagcgcggtgggcgtcaagtgccgcgtgcgcgtcccgtcgggatggatatacgtgtacgtgtggccggagggctcgagcaccacggtgtgcgtctcgtgtgtgttgcggtggtagcatccgattgcgctgccgtccgccagcaccacgcagcgccggcgcttcgcaactgccgccattagaatttagacctcttacctcttctgaaccttcctttttcgagaccactgagattaaataacctatctcagtggatcaggttgctggttgagggtgggcaaagcaatttgagccgcctcgtgtccctctgcgctacatgtacttacacgcgtcaagcaaacgagggcgcgtctgcagttctctaaaatataccccgagtaagcttacatgtagatgttagatgtgaagatgctgttccgatgaagactacttcatgttttcgtttagcttgtttttttcaaatatgtaccccctccactctgtcaatattcgggtggcctcgtattcttcgctgctgctgcgcgacgtgagggaggcgatacataccaaaacatcgagccgctcgattctttgctgtcttcatcgtagatgttaaaatcgtagatgttaaaatctacgatgaagacagcaaagaatcgagcggctcgatgtttttactcgattcgcgtcaaattattgtctttgatcttgcacgaaatcgtgcgatacggcatgtacaatgggaagtggagacactgcgtcaacagctagggtcgtcaacatgaggaggccaaacttaaatgaggggatcaagccaagcctgcagatataatcactctcacttctggcttcaccaacttgagcaattttcaagccctgtgtctcgaagtcgatatgcaatggaccagtggtctggcacggaggtgtttcctggtcgaaactcaaagtacggtactacggacagttttcatgcagcgcgacgaggctaccgcagcttatgcgacggtcctaaaatgaagtgttcctgtaccgtattcgagtgcaccgaacggcagcgtaagaaatactaatcagataacctcgaaaatcgatcgattagcacccttatttagctcgatcgatttgtaaatcgatcgcgtccctgcgatgcataatatgcatattatgtgagttggtgtgcagattagacgatcgatttatgaacgagcagtcgatatagacgcgtttggagcagaatacccacctttcactgggcaatcgtgcagcctggcgatgcaaatggatcacagtcgatttaaaccctgatttgcactccgattaattaagtgattgaggtcttataagggattactacagacgggcgttttaaccggttctcactttctgccaaaacgccctccgatttgaggtcctacgtaggacttttgctcctacgtaaggtctcataaaagttagtaccgaggacagtaaaacctggtataaacaaaaactgaatgtaaactgagcgaatgacttgcaaaggtagaccgacaagtcagcgcgttcagtaccgttatacctgtagcacatgtacgtagctccacgctgagcacggtgacctgggtgcggtgctgcctgagtctccgcctgtacgagtgtgtccaaactatgcatttgccacagatgctttcaggcgcactggcctgatccagtcctacgaaggactcgttagtcctacgaaggtccaaatggccagcttaacgtggccattcgggccttgcttccaaaacggtaccctttaggtgaagacggagctcctacgtaaagtaggactttcgtattccgatgcaaggccaacagcaaatcctaggttgggccccaccctctccttcttaagaccaccttttttgaggtcagattggccaaagttttggaaaggcacactaccggtaaactaaacgacgaccgtgctaatacatgtatactggaaaatttcaaaattgcaattgctgacgtctaattgagaattggtattgccgcgccgtctgcagtagaatattaccatagtacaagcaaaatgttgtacggcggatagagcaagatatctttttcattcaaacattgcttgaaatgcccatctgaagaaaatcttcaatgcctaggcgtacatgtatcgccacaacgaagttcagtctcagggactcactattgtacatacgagatgtttggatgcagtcttattaatagacatgtacagtatatgtattaccgtcacttgacgaatcacactgtgacggtctccagaccacgatgaccttgaatctcattctgcgtttctccttccagttatcaagagcccgaccaccaagcgacaatgcgccaaccaacaccctcgtcgtggctgttgctgccatccttctcgcaagcgaaaacgctttttctgcagcaactgacgccgaccaggctaccgtttcgaagtttgcggcagcggagttcgacacgttggtcgatgtcctcaccactgagagcaagagatcccttcgggccacggtcgatgacggcgaagagaggtacaagcagtttaaaatcgatgatttgagaaacggaaagtggacttcattttttaaaaaatggagctcgaaaggccgtactgagtccaacatcgagaaaaagctggcgaaaattaaagggctgaccgattatgacaaaagtaagattgtcgattggtatggattccacttgagaggtcattagatacatgctccagcggcacgtgcatggagaccgtcggggagttgacactgtgacaagttctcgaatcgtctgtaccagtccgtccttgcaatacacttgagagaaaatgcagacaatcttttcaccttgaacccgtgtttccttcatgtcgttggatcttactttttttttagcagagtggagcagaaaatcttgactataatagccttcttgtacgctcggaacttgtaaacgattctctactgctacgcaaccccgtcgtgaaattttagcggtgcaacctcggagcggtaccatgcatcatgggtccttattagcttatttacgtttgcggttacgacggaggataagggagttctcatgaattgagatagctcttgcttagagcctgttcgcgttgtactagagatggagatggtgcttgatctccacctacagctcgttcgctacgtatccatctccagacaaattttaagccaatcacaggacagatatgggatggctctcctccccacttgagaaaatgcagtgcggccacgcgtgcggcacatgccgctgctcaaggctcgtcggttcctgcgccccccgcacgtcatgacgaaacgccagcgttcgagcccctcgtctcgctgacaccatctgccggtgatgaaggtctgctgctagaaggtccgagactgcgtccacatttgttccgctacctcaagtatcagtggcgatgtctgctacgctagagcctactcccgctccatctcgcatgctcaagcgtctgcaagcctcggccgcaccgcaagcagcacagggccgaggcaagtctcgtctgaaaggagcttctaacgtcaagccgtcgtttgcctggacaccgagagcggccgaagtgctgttgcggcttcgctacgataccatgagaggttggtttcagggaacgaggagccccaagcagcttactgcggcatggaaaatgcttgctgccgaaacattccgcctcggagggcttgaagttgatgcagagcagtgcaagtcaaaggtgtgtatgatgacaaactattgacaggaacttgttaatgctaaccgagttcacttcatttcaatcctattgtagctgaagcatatgcacaagcagtacaccgcgtaccgtgttgctctggaggctaccggtaacgccaccgagaagccgctgaaggagcccgggtgctacgaggctatgcgtgacgtgtggggggacttagaaggcatggatgcggacggcttttctctagtgatgcaacaagcactgaactgctggaggacgagactgcactggagctcagccagagctctactgctgagccgctgctacagcatgaagaggacattgatgtagctgatcacgagggcgggcaaaatagcagtggatggaagcgttacactggcaaaagagcccgcgaaaggcattccactaatattccactaatactggtaatagaagaagaagaagaagtactatgcagaaggaatgcgagcaattggtgcgggactgaacaacattgctgaggcgttcaaagtcgctagagtcgctgataccagcaatgccgacatggtgagatcgatgaaggagctcatgtaaaccgtgcaggcacaaacgcaggccttgcaaggcctgattggcattttggctgccaacaaaaacaacgagtgatctcgacaacaagtgagcaacaagtgatcagcatttagtcaaaccaacaagtgatcaccatggtaaatggcaccgtctatttagtgacaaataagagtagcaatagcatttctcttagccttaccaatttggcgcaggtgccttggaataatttcatcctcggcagcttcctcctcgtcgtcttgcgccatgtacagcctaattttcgagctgtcttgaaaaaaaatcatgacgttgtgcagcaccatcgtcgcgaccacaaactcggccgccgtgcgaggtgtttcctggttgaggaccccttgaagcattctaaatcgccccttccagaggccgaaggtgctctccaccaccattcgagtgcttgaatgccggaagttgaattgcttctgctgtggagttaacactccttcttcacgccgccagtaaggaacgatgaggccaggtagctgggcataccccgcgtcaccgatgaagtgcataccagcggggatcacgctgtgtacggtccgaccaattctactgtatttccagcactttcggtcagaccaaaaacctggccgcacttcaacgctcataaaggtcctgtcggggctcccgatagcctgtacattgagcgcaggatagcacttgcggcagtagaagccgtcatagtcctcaggacgctcaatagcaatcaaagagccatctatagcaccggcgacatctggataaccatacggcgatgcaaagccgtcctcaacagcagtccacccgtcccgactgcgcggaaaagaaatcaccgctggcgctaccgcatttagcacgcgaactacctccgtagtgatctccatgacgtagcttctagccatgcccattgcagctcccacctcgcgatatccacccgctgagcccaggaaatacagcgccgctgccaccttcttttcgtaggaatgcttcttgaccttagcttgtgcaaaagcgaccccatgctcttgtagaaagctagctatacggaagaaggtggatctcgtacagcgcagattggtctcgaaccagcttgagtaggctgatgattgaagcatcgactcgaagcgcagagtggtgacggtaaaacggttcttcttgccagcaggaggtcctagttcacaactgtctgcatacaaagccacagccgtgccacggcggagcacgcagcgaggacaattgcatcttcgtctcccatgttgtgcctggccctgtaaatctctaggtagatccgcccctctccacctcaaagagctggagacgaattcacagtgccatctctagttgtcttgttgtgtgctacctacttttgaccaatccggtcacacttttggttttcgtctccatctagcgaacaggctcttaaatatcactgggtagtacgattaggattacagacaacgacggataaaatacggcaacgcaaaacccggcacacatatgttgtactttttacaataagaaattcagatagccaatcatcttcgagatttacacttgacatttgtaatccatatggttttaagtacgttctctaaatttgtgtgtactttatgcatccttgcgagaattattacctgaaaggttagctacaatctgtgcgaaaaacgtccaaatttgttcttctacccggtatggtatactgaaacacatattattccttatgctgtctgggacggtttaagcgttttaaatgacctctccgcgtccaacgggttaatagacatgtacagtatatgtattaccgtcacttgacgaatcacactgtgacggtctccagaccacgatgaccttgaatctcattctgcgtttctccttccagttatcaagagcccgaccaccaagcgacaatgcgcctaaccaacaccctcgtcgtggctgttgctgccatccttctcgcaagcgaaaacgctttttctgcagcaactgatgccgaccaggctaccgtttcgaagttggcggcagcggagttcgacacgttggtcgatgtcctcaccactgagagcaagagatcccttcgggccacggtcgatgacggcgaagagaggtacaagcagtttaaaatcgaagccttgaaaaaaggaaagtggacggatattttcaacaaatggaagggtaacgagcttagtccggccgaggtccagaacaagctgaaaaacaagaaattgagcgacgatttgaaagacgctattttcaggaattataaagactggtagactggtacttcggtacatgctccagcggcacgtacatgaaaatcgtcggggagttgacactgtgacaagttctcgaatcgtctgtaccagtccgtccttgcaatacacttgagagaaaatgcagacaatcttttcaccttgaacccgtgtttccttcatgtcgttggatcttactttttttttagcagagtggagcagaaaatcttgactataatagccttcttgtacgctcggaacttgtaaacgattctctactgctacgcaaccccgtcgtgaaattttagcggtgcaacctcggagcggtaccatgcatcatgggtccttattagcttatttacgtttgcggttacgacggaggataagggagttctcatgaattgagatagctcttgcttagagcctgttcgcgttgtactagagatggagatggtgcttgatctccacctacagctnnnnnnnnnnnnnnnnnnnnnnnnnnnnnnnnnnnnnnnnnnnnnnnnnnnnnnnnnnnnnnnnnnnnnnnnnnnnnnnnnnnnnnnnnnnnnnnnnnnngcatttagtcaaaccaacaagtgatcaccatggtaaatggcaccgtctatttagtgacaaataagagtagcaatagcatttctcttagccttaccaatttggcgcaggtgccttggaataatttcatcctcggcagcttcctcctcgtcgtcttgcgccatgtacagcctaattttcgagctgtcttgaaaaaaaatcatgacgttgtgcagcaccatcgtcgcgaccacaaactcggccgccgtgcgaggtgtttcctggttgaggaccccttgaagcattctaaatcgccccttccagaggccgaaggtgctctccaccaccattcgagtgcttgaatgccggaagttgaattgcttctgctgtggagttaacactcctccttcttcacgccgccagtaaggaacgatgaggccaggtagctgggcataccccgcgtcaccgatgaagtgcataccagcggggatcacgctgtgtacggtccgaccaattctactgtatttccagcactttcggtcagaccaagaacctggccgcacttcaacgctcataaaggtcctgtcggggctcccgatagcctgtacattgagcgcaggatagcacttgcggcagtagaagccgtcatagtcctcaggacgctcaatagcaatcaaagagccatctatagcaccggcgacatctggataaccatacggcgatgcaaagccgtcctcaacagcagtccacccgtcccgactgcgcggaaaagaaatcaccgctggcgctaccgcatttagcacgcgaactacctccgtagtgatctccatgacgtagcttctagccatgcccattgcagctcccacctcgcgatatccacccgctgagcccaggaaatacagcgccgctgccaccttcttttcgtaggaatgcttcttgaccttagcttgtgcaaaagcgaccccatgctcttgtagaaagctagctatacggaagaaggtggatctcgtacagcgcagattggtctcgaaccagcttgagtaggctgatgattgaagcatcgactcgaagcgcagagtggtgacggtaaaacggttcttcttgccagcaggaggtcctagttcacaactgtctgcatacaaagccacagccgtgccacagccgtgccacggcggagcacgcagcgaggacaattgcatcttcgtctcccatgttgtgcctggccctgtaaatctctaggtagatccgcccctctccacctcaaagagctggagacgaattcacagtgccatctctagttgtcttgttgtgtgctacctacttttgaccaatccggtcacacttttggttttcgtctccatctagcgaacaggctcttaaatatcactgggtagtacgattaggattacagacaacgacggataaaatacggcaacgcaaaacccggcacacatatgttgtactttttacaataagaaattcagatagccaatcatcttcgagatttacacttgacatttgtaatccatatggttttaagtacgttctctaaatttgtgtgtactttatgcatccttgcgagaattattacctgaaaggttagctacaatctgtgcgaaaaacgtccaaatttgttcttctacccggtatggtatactgaaacacataatttttcttatgctgtccgggacggtttaagcgttttttaataccgtccatgtcacccctccgcgttcaaggggttaaccccttggacgcggagggttggataatcacctgatgctgttcagaacagcataagaatcacttggtttcattatgtctcgaaatccgcaaaataggttctcgtcctttcccagaaatcgaaagagactgattggtccacgtgttcaaaaggagacaaacgaatatttagtaaaacatatgccttgaactaccgcgtgcaagggcgggcaaaatgttttcggataaatcatatttaggttcccctctcgagctcggacgccagcggtgctgtcagttgggggcgctgcagaagaagatgatgatgcggcttccgacgaagggtcgacgacgggcgacccctaccaacaaaagcgagcgcgcacggctagcatcgcggagtaagcaaagggtgtgtccttgattctgtctcttttcaatatgtatcaatatgtattgaaaagagacacaatcaaggacacaccctttgcttactccaatatgtatcaatatgtattgaaaagagacagaatcaaggacacaccctttgcttactccgcgatgctagccgtgcgcgctcgcttttgttggtaggggtcgcccgtcgtcgacccttcgtcggaagccgcatcatcatcttcttctgcagcgcccccaactgacagcaccgctggcgtccgagctcgagaggggaacctaaatatgatttatccgaaaacattttgcccgcccttgcacgcggtagttcaaggcatatgttttactaaatattcgtttgtctccttttgaacacgtggaccaatcagtctctttcgatttctgggaaaggacgagaacctattttgcggatttcgagacataatgaaaccaagtgattcttatgctgttctgaacagcatcaggtgattatccaaccctccgcgtccaaggggttaaccccttgaacgcggaggggtgacatggacggcattaaaaaacgcttaaaccgtcccagacagcataagaaataatatgtgtttcagtataccataccgggtagaagaacaaatttggacgtttttcgcacagattgtagctaacctttcaggtaataattcttgcaaggatgatgggcacgaccagtagaacttcttcggcagaagttctggaaccagtagaacttctgccgaagaagtctacttctactggaatcagtagaacttcttcggcagaagttctggaaccagttctactggaaccagtagaacttcttcggcagaagttctggtagttctactggttcctctccccgtaattcaacaatatcaggattgcgtgacttcgtgcaattggctgtgattgggtcacacaaatatccggaacgtgcccatcatccttgcgagaattattacctgaaaggttagctacaatctgtgcgaaaaacgtccaaatttgttcttctactcggtatggtatactgaaacacatattatttcttatgctgtccgggacggtttaagcgttttaaatgacctctccgcgtccaacgggttaatagacatgtacagtatatgtattaccgtcacttgacgaatcacactgtgacggtctccagaccacgatgaccttgaatctcattctgcgtttctccttccagttatcaagagcccgaccaccaagcgacaatgcgcctaaccaacaccctcgtcgtggctgttgctgccatccttctcgcaagcgaaaacgctttttctgcagcaactgatgccgaccaggctaccgtctcgaagtttgcggcagcggagttcgacacgttggtcgatgtcctcaccactgagagcaagagatcccttcgggccacggtcgatgacggcgaagagaggtacaagctgtttaaaatcgaagccttgcaacaaggaaagtggacttcattttttaaaaaatggagctcgaacggccgtactgagtccgacatcaagaaaaagctggcgaatgttaaatggctgtccgaatctgacaaaagtaagattgtcgataattatgtattccacttgagaggtcattagatacatgctccagcggcacgtgcatggagaccgtcggggagttgacactgtgacaagttctcgaatcgtctgtaccagtccgtccttgcaatacacttgagagaaaatgcagacaatcttttcaccttgaacccgtgtttccttcatgtcgttggatcttactttttttttagcagagtggagcagaaaatcttgactataatagccttcttgtacgctcggaacttgtaaacgattctctactgctacgcaaccccgtcgtgaaattttagcggtgcaacctcggagcggtaccatgcatcatgggtccttattagcttatttacgtttgcggttacgacggaggataagggagttctcatgaattgagatagctcttgcttagagcctgttcgcgttgtactagagatggagatggtgcttgatctccacctacagctcgttcgctatgtatccatctccagacaaattttaagccaatcacaggacagatatgggatggctctcctccccacttgagaaaatgccgactcgcctcaccagtgcggccacgcgtgcggcacatgccgctgctcaaggctcgtcggttcctgcgccccccgcacgtcatgacgaaacgccagcgttcgagcccctcgtctcgctgacaccatctgccggtgatgaaggtctgctgctagaaggtccgagactgcgtccacatttgttccgctacctcaagtatcagtggcgatgtctgctacgctagagcctactcccgctccatctcgcatgctcaagcgtctgcaagcctcggccgcaccgcaagcagcacagggccgaggcaagtctcgtctgaaaggagcttctaacgtcaagccgtcgtttgcctggacaccgagagcggccgaagtgctgttgcggcttcgctacgataccatgagaggttggtttcagggaacgaggagccccaagcagcttactgcggcatggaaaatgcttgctgccgaaacattccgcctcggagggcttgaagttgatgcagagcagtgcaagtcaaaggtgtgtatgatgacaaactattgacaggaacttgttaatgctaaccgagttcacttcatttcaatcctattgtagctgaagcatatgcacaagcagtacaccgcgtaccgtgttgctctggaggctaccggtaacgccaccgagaagccgctgaaggagcccgggtgctacgaggctatgcgtgacgtgtggggggacttagaaggcatggatgcggacggcttttctctagtgatgcaacaagcactgaactgctggaggacgagactgcactggagctcagccagagctctactgctgagccgctgctacagcatgaagaggacattgatgtagctgatcacgagggcgggcaaaatagcagtggatggaagcgttacactggcaaaagagcccgcgaaaggcattccactaatattccactaatactggtaatagaagaagaagaagaagtactatgcagaaggaatgcgagcaattggtgcgggactgaacaacattgctgaggcgttcaaagtcgctagagtcgctgataccagcaatgccgacatggtgagatcgatgaaggagctcatgtaaaccgtgcaggcacaaacgcaggccttgcaaggcctgattggcattttggctgccaacaaaaacaacgagtgatctcgacaacaagtgagcaacaagtgatcagcatttagtcaaaccaacaagtgatcaccatggtaaatggcaccgtctatttagtgacaaataagagtagcaatagcatttctcttagccttaccaatttggcgcaggtgccttggaataatttcatcctcggcagcttcctcctcgtcgtcttgcgccatgtacagcctaattttcgagctgtcttgaaaaaaaatcatggcgttgtgcagcaccatcgtcgcgaccacaaactcggccgccgtgcgaggtgtttcctggttgaggaccccttgaagcattttaaatcgccccttccagaggccgaaggtgctctccaccaccattcgagtgcttgaatgccggaagttgaattgcttctgctgtggagttaacactcctccttcttcacgccgccagtaaggaacgatgaggccaggtagcagggcataccccgcgtcaccgatgaagtgcataccagcggggatcacgctgtgtacggtccgaccaattctactgtatttccagcactttcggtcagaccaagaacctggccgcacttcaacgctcataaaggtcctgtcggggctcccgatagtctgtacattgagcgcaggatagcacttgcggcagtagaagccgtcatagtcctcaggacgctcaatagcaatcaaagagccatctatagcaccggcgacatctggataaccatacggcgatgcaaagccgtcctcaacagcagtccacccgtcccgactgcgcggaaaagaaatcaccgctggcgctaccgcatttagcacgcgaactacctccgtagtgatctccatgacgtagcttctagccatgcccattgcagctcccacctcgcgatatccacccgctgagcccaggaaatacagcgccgctgccaccttcttttcgtaggaatgcttcttgaccttagcttgtgcaaaagcgaccccatgctcttgtagaaagctagctatacggaagaaggtggatctcgtacagcgcagattggtctcgaaccagcttgaataggctgatgattgaagcatcgactcgaagcgcagagtggtgacggtaaaacggttcttcttgccagcaggaggtcctagttcacaactgtctgcatacaaagccacagccgtgccacagccgtgccacggcggagcacgcagcgaggacaattgcatcttcgtctcccatgttgtgcctggccctgtaaatctctaggtagatccgcccctctccacctcaaagagatggagacgaattcacagtgccatctctagttgtcttgttgtgtgctacctacttttgaccaatccggtcacacttttggttttcgtctccatctagcgaacaggctcttaaatatcactgggtagtacgattaggattacagacaacgacggataaaatacggcaacgcaaaacccggcacacatatgttgtactttttacaataagaaagtgcctggccctgtaaatctctaggtagatccgcccctctccacctcaaagagctggagacgaattcacagtgccatctctagttgtcttgttgtgtgctacctacttttgaccaatccggtcacacttttggttttcgtctccatctagcgaacaggctcttaaatatcactgggtagtacgattaggattacagacaacgacggataaaatacggcaacgcaaaacccggcacacatatgttgtactttttacaataagaaagtgcctggccctgtaaatctctaggtagatccgcccctctccacctcaaagagctggagacgaattcacagtgccatctctagttgtcttgttgtgtgctacctacttttgaccaatccggtcacacttttggttttcgtctccatctagcgaacaggctcttaaatatcactgggtagtacgattaggattacagacaacgacggataaaatacggcaacgcaaaacccggcacacatatgttgtactttttacaataagaaattcagatagccaatcatcttcgagatttacacttgacatttgtaatccatatggttttaagtacgttctctaaatttgtgtgtactttatgctccgttacatgtattttatgtcattgccttgtacaatatctatggttcccgacagagaattctggtacatttactatggaggatgccattcagtggtgccggatgtatccgtcgttgtctgtacacgttgtatgcggtctcaaagccgtcccatgcaccgtcgtccgcctggaactggcccgaggcgttgggctccgcggttttctcctctctatcgtccgtgtggcgacgagcgtcttcgtcgcctccacctgcctccttgtcgacgtcggagccaaagccccccagcgccaccatcccccgcggccagcgatgtgccagcgctcatttgacgcctcatcccaagctccgccgaaggcccagccgcgggagaacaccagtggcgtgcttaggggctggtcgcgagaccgtgcttcctttctcggcgctgattggctgaaaacaccccttcaaacgcacgaaatcagcagcatgatgagtgtagccatttgttgaacacgcagatatcatttcgaaacacgacattttggtgtttgatactgtacagtcgaacccctcagtaagcgcggtggggttttggaagcgatttgaaagggaatcggaaataatgaacagtggttatatgtccttcgcttcaatctgattttacggggtatttgaaggtagtggtgcccttactgaggggattgactgtaacagtttgagtaacagtttaagcattagggaaagcaacacgcaggccagcttcttgacctggacgacgaacttcatgcaagtgggttgcgctcacgaagcgtcttcgtcatcaatcgtgagcatgttctgtcgctgatcggacaattgacgtcgtcgtcgggcatgtcgaacagacacttgctgatattcctggcggtacttttgcaccgtcacgttatcgatgcacacctcaaggaagtacttgaacaggaacatgcctcaaatgaatatttagaacatccactcgcgggtcggtgtgtccaggtggttggagaagttgcctatgaagactaccacggtggcattggtgcacactacgatggatgagtacattaccctcataccgcgcacattgcgtgggcgggggcgccgcgacccgaaaatcaagcgatatgcgtccagacgaatctcagagtagttgtttacgtacgatagcagaggcgtgaaggggaaggccacgacgaacattgtagtcgtgaagccaaactgaagcgccatctcaatgtagtcatcgaacgtgtcatgccagtcatactgggccatgaagagctcgcgctcagcgtcagattttttgtagtcgtccaagtgaccgagtaggcgatacttactcatgtacatgaacaagcgcgggatggtatcctcggtaatgttgccgacgaacagctgagaacagaacacgatggcgaccatatactcgagctcgtgcatgcagctgatatcgcagccttccaagccttgcatgaggagcgcaacgtagcagagaacggcgtagttgttgacaaactggacgatcgcagtcttggcaatgagactgttctcctgctccatgtgggtagtggcgtcaccaagcaaattgagagatgctcaattcattcgtgtaggattgcagctgctggagtctttggctggagtagcatccttggattctacgtgaagtgacgtccaaagccccaagacgcgatgacaccatttccagagccgactctcatccttctggctgccattcacctacggagcggcatcgtttcgtacgtcaagtgagcgacttggtttgtcgaacgatgcctaaattgggacgtaagatgagccaagcggataacgagagctgatgctattgttgtgctctttactcatagcacgcacaagttccatcctgtagtttcgagctcagtactgtgtagtagcaacatcgagtgaccgagctgttttgctacagctctgcaaagttgactacgggtcctacgtgtaagttagagagcgactccagtctcgactcactttttccgactcaagtaattctcgatcgagcgcgcggaaagcacacactagcccccttggattcagtctagccccacaacgtagcaaacgcacttcaagtttgtatatgtccgacatgggccaatccggcgctcgttacgagtctatttgggtggtgcacccaccagcttcctgattggcccgcactcaccaccacactaactctacaccactctaccacagtcagcacagcatctgcatcacctcatcaccaccacctccatcgtcagccatgactgcgactgagatgcggccgagacggagacgctcaagcgcaccatctacgtgtcgtcgcgcaagaaccagctggccacggcccagatcaacacggtcatcgccatgctggaggacaaattcccggcgctgcgcttcgtcgtggggcagcaggacacggtgggcgaccaggtgctggaccgccacctgagcgatctgggcacgagcacggcctcgggcctcttcaccaagatcctggagggcgcgctgctgaccaagaccgccagcttcgccgtgcaatcgctcaaggacattcccacgacgctgcccgagggcctcctggccgccatcaccaagcgcgagatccctgaagacgcggccgtgatccaccccaagcacaagaccaagggcctcacgctcacgcagctgccggagggtagcatcattggcaccggctcgctgcggcgcgaggcgcccctgcgcaagcagttcccgaccttcgagatcaagacgctgggcggcaacatccagacgcggcaggccaagttggacgagcatgacgactacgacgccatcatcgtggcggcctgctgctttcgacttggcgcgctgggcgacaggatcgacgagattctgcccatggacacgttcggctacggcgtcggacagggaagcatcggggtcgagtgccgcgcggacgatggggagcgatgaagaagaactcatgagctacaaaatgcagcacacgccctcagtgaatgctggaacagcagtaacagatccaggagcaggaggacattcagacagtcactgagagaggtcacttcagctacgcgcagggcaatgcggtcttcgattcaattatcgtttcaatatgcatgacttagtgctatcctcgtattcatcttatagcttcaatcacttccggagctgctgtcaattgggctgccgccagggctttcactaagcacgtaactgctatcgtcatcgttatcagagttgctgctgcatgaactgctactgctactggctggcggacgagcgggggctgggagattggacgctcgacgctcgactcgatcgtcacgttcctcgttctcaataccgattttgtcgctcttccgtacgtagccaaacggaatctccgagtcggtccacttcaccttgcctttgaggaaccccctcttggtgtaccggaggcgcccaatcttgcacgggtgttcgccatcggacaaatccgctgtgacttgatgcatcacgccttgatcttcaactggtgcatcaccgacgccatcttcgggcccgtcatcgctactctgggcatcgctactggtagcattcgcgccatcaaaagtctcagctacaccaccttcaccgcggctgtctccgccgccacctcgtgcacggctctcctgccctcgtccttggttcaattgacgtcggtcctgcaaaacgcttcctggggtggtggcttcaacgccgccttgtacttggccgtgttgccgtcgcccttggcgcaattgatgctgaccctgcgaaacgcgtcctcgggcacgttcacctccgccgctatcttcaccgctgctgtcagcgacgatgcttaatcttgccatatcgtttctcggttgattgtttgcttttggtggttctgaaaagaatttcgaccagccaccttcgttttgatcgccgggtctcacattgagaacaatttagctacttcgtcaacggcgctgacatggccatgcggtgcagtagatcgagcgtcaaaaacgatgccggcctggagtcgagctagaagagctgtatggacagcctcacagacattaattcgtccaaaaaaagttgctcgtaccacaagcaccattcggacaacatcgcatcggtgacacataacgttcacacagatcagcttgactataggtagtgaagctggagagcaagaacgtgactaggcaattctgcggagctacgagacactgggcaaagagggaaactccgtcgacgatgaagaagagagattcgcggacgactcggtctgaaagacgatttcgccaacaggtacctgaggaagatgaactgccaaacatgttgagcgtggatggcgtcatgacttggccaagaaagcgaaaagccgggctagggtctgcctgcaaatgtaagatcgacttacctctagcctcagactcgttgtattataaatctaataagtctgtcattattataagaggtacagcttcttaattcatcgcactgttttcagttcactcgctttcttcttcattgcatccaggtattgtccctctgaggggtcaaacggcctcatctttagtagcactggcgggttattagatgtggcacgcgtcttcgctatgacaagagcatcctctgtttccagcgcatgatacgggtcaggacactcgcctccttcatcgacgttggtgtcgtgtgttccaggacacgcaaactagatggtatgatcgagtaatcgcttctcgctacatcactgtagccctcagtttacattctggcaaccctcctactcgaacgaaaagaggtgcagtggaaataatgcactgcccgagcgatttaagggcgcgggcggcgtccttaaatctatttgcttgctatgtaggccatcgcaggacgttagttcaaaacattctaaccttcttaaatggtggcgaccacaggtcgccaaataagcgagtttcgtgagataagtgccagttgcacctcacatactttaactgccttcccagcctaaagcaaagccccttgtattctcataccatattactctgggctgcgccgtgggcgtacatggaatatggattcgacaaccagtattagctcgcttgaggcgccactaatttgaatgataacggtagagcagcaaacatacaaaaatgtttgtaaacagcacttacaatgggttggtgtgttgtgaaaatcactaacttgtttgcggagtacactaactgcgacgaacaccgcgtaggttcgtaagcaagttttcgctgcaccaacacaaaaaatcgtcgtttggaggacgacgccattcttcgtagtattttttggaagcggatactagagaacggtgtcatgtttgctaacccatctcgttttttagtttgttccgaaaaagtaggcttatccggcgagtttccaccgacattttcacatgtgctgacttcattatatccttttacagacttaaattactaacttaaattagcatatttcgaagtactagtacttagtacaaagacaaagcagatatacttcagaaatagaagtcttccacgtaggagtttaaaaaagttaaaaacaaacaatcaataatcttgttttctcttcttcaccatgcacttttcaaccatacgatgttaccaaatgggtaggcacgggtctcgacaaacagcaacctttttttcttggtatcctcatagtcggtccccatagtcggtgttgtcgttgtcgtcctcgtcctcgtcggacgaggagtcgtctcgcggcgtaaaccggcggctcgggcgtcgcgcggagcttcgttgcgcgccgctggagtatcaacatcgcggctcagtgccctagcgaatgctgttgagcctgacaagtgttctctcgatagtatcgagttgatacaaatccttgaatcaccttttgcacaaattttcattttgtttcccctacatttttctaaatgctaaatctaactggccgagtggccgttttctggtgtattctttttcaaatttgggatttgtaccgatttgtgacgcccaaaacgctttgtccaagcttagttggtcgtaatcctatcctattggtcaaaatcttttggcgcgacttgcttcattatggcgccatcactttttccaacgcaaaaaaacagagcagaacgatggactttggaggcgccccgaccggcaacgcgacgcacccgcgcgtgaacaagaagacgatgggcgcgtatgtgggccacacggtcgcgctcgtcggtgctgtggagagccactcgcacactgccgtcgtgttgcgcacgtcggtgagtcaccactcaacgaccgctctcctatcaacgggtagtggctccatttttatttgtgatctaacgccgctgcctgctgtgtttaggacggggagatcgtaaacgtgacgatccagccaggcaccgactacggcagcaaggtggtggaggtcatcggccgcgtcgtggactcggagaccatccaggagttcaagacgacgctcttcggcgatagcttcgacctggacgtgtacgaccagttcgtgcagctcgcgcagtccaagtacaagaacctgttcgagtaacttgccacggtggagtgggggcaatgggaaggttattagtggctgagaccaagaatatatagatttgcacgtcaagttatgcatctgatggggtctctgtggtctctactgctgctacttcgtctttgtcgagtgttccggtcgactcgatggatggtagagatctggtggagtgaagatagccgtggctgagcggacgcggggccttgggtgtctggatgtcgttgatctcgcgctgcacaaggtgcacgtggtagtacggcgtgtagatgcacttgtagagctgaaagtgtcggtagtacgagttcgtgacgtagtccacgatgactgcgacctcctctcgggtaaagatgcccacgctacaagtgattgacgacaaataaacactgttagcgcgttcgccagggcgcgtcttgagcatgaacttgcctctttggcgaccggttgacgctgtgggtgagcagaatctgctcgaagtagtcaaagctgctcttgaggtcggtggtgctttcacgcgcaaagtcgcgcttcataagcgtctgacagatcccaaggaagacggacgtctggttgagctggaagtgcctttgcctgcagaacgtaaacacccttcaaccgttaaggcgaactctctcatcctctacctcaactcgaattatatgtaaaggctacaaaagatacagcagaaaaatgcagtgcatagtacaggaaggatatgagtagttgtgcaggtggaagtccagcaagaagccctgcttgtcatccgaggcgtccaagtcgaagatctccgccagtgcactgctcaccaaaagttagccaatgtcatccagccaatcgctcaacccagctccagttgtagccgccatcagcagcgacagacagacagacagattttatgacctcttgcagtcgtccaccgagtgccgcgtcgccaacttggccagctcgctctcggtcgcgtgcttccacacgatggcctccgtctgcagtgcagagaccggtcagtacgctctgcagggcgatcctgccacgtcacgacactaggccacaaagtatccatcgcagtctcactgcctactagatgcaagccaaaggcgaggaaaaatcccctcccaacgcaccatggttagttagtagcgtatcctccttccaagtcgaagttgccttctgaaacagtatcaaaacgccgcatggcttcactcgtactttgccgggagcgccgcacttaagccgtctatgcagccattccgaagagtggctcttgcgcagccaatcgcggcgcagcaagcgcgccgtctggctcttttttctgccaatgggagatggctcccccctctccctctgctctgacacggcatagcacgcctgcttgctgccagcctcgccggacggacaagcgatagcggtgccccgggcgaagaaggcctccccacgaccgaccttaccgagagcgagcggggagcagcgagtgcgtgcccccccccaccgaccggtccccacggcgaccccaagcagtgacatggaggcggccgccgcgcccagcgacgccgccactcgcccgtccaagacgcccgcggcgcctgaggacgctcccgagatcgtaggcgagcccgtgacgctcgaggagctcgtggcgcccaccgccagcggcttcaagagcaaggagagcgcgcagacgcccgcggagacggcggacgaaccgtccaaggaggagaacaacgaggcggcgaagaaggagcaacagcaggaggagaacgagcagcagcaggaggaggaagagaacgagcagacagaggcacagtctactgctgctactgctgctgctgctgctagtgaagacggtgagagcgagcctgtggccgtcgtggagacggaggcgcaggttgattctgtcgaggagacgacagtcgaggggctcaccgacggcgcgaacgaaactgccggcagtaacgacgacagcgaagaagatgtgctgatggagttggcggctttcgacgacgaggacgacgacgagttccacgaggccatggaggacggcgtggacctgctccaggaccccgccaagcccagcgtgcccccgaccatgagcttctccgtgaacgagatggaggtcatcacgaaccgcggcggacgcgccggcagtttgtccaagttcctggatgacgctgacacgttccgccgccggtcattaccttcgtatccagacgaccagctgttctcgggctcaatgagtcagaagaagatgacgctcgcggccttcctggacatgcagatcgaccccgtgctggagatcctggaggacacggactcggacatccgcctctggctcatgcagcccgagacggtgaaggaggtgctcgcggagtttgtgaccccgcccgtgctcagtggcgagccgcacgaggagtacggctactacaagaagcacttcttgtgctccgagatcatcatgaagctctacactggcgaggaggatctgtacgagtctttttcgtccgactcgagctcgggctcgaccgcgtcttccgccgtctttgggtgccaggagccggaggacattgaaaagtgggagcagctctactccatctttaagaaccccatcccgttggacgagatgcagcttctgttcttcagcaaggcgcttgtgcggctgcacgacggcttctgcctcgaggaaggatacgtcaacaacgtgctgaagcggttcttgccgatggttgtgccgcacctgtactcgaacaccatcaagtacatgctcacgctcatcctgcagagctacgagagtgtgcacccgatcaccggccgtaacgacgccatggagattgcggcgccgctgctggctgaggccacccgcgtgaacccgaccaagccggagaacctgccgctggtggagaacacgaccaacctgcttgtggacatgctgcaagccaatcaagctgaccggctaggcgcgttcagtcgccgcgaaggtggtgtgtacctgtccaagtactttgtgcgtgaccagttcggcacgatccgaggcttcgagtcgatgacgcatgggtaccacaacttcctccagtacatgctgctggaagagatgtcgaagcagcccacaatcgtggaggagctgttcaagaacgctgcagatgagcttgctattattcgcgagaagaagctctctgaagtgtcgagcgctctgaacattcacgtggcggctgagctcttggttctgtgtcaaaaactgctgaacgaaagtgctgagagtgacgacgacaacaaccagacgcctgagatggaagcccagaacacgcaaatgttcgggtactcgactttttcgtcggagcagtaccccaactcgccgcacgaaggtgccaacgagacgtccatgtacaacctgacgtctctgccccggggacacgctctgtggactttcgtgctggatgtggctcggaaaacgtgcggcgccttcgtggagcagctcaacaaggggcttccttcgtctgtggagatctcgctggcaaagtatttgaataacctggtcctgctaaacgatgccactattgatgaggagctgcacaaggctggactcatccaggcctatctctccatcctcgagaaacgatcgtcgtttgacatgctcatcatccacgttgtccctgcgatctcattcatcctgcgcgatgctgatgcgtcccgagcaaagaactgtcctctgacgaaggacctgttcgatgtcgacatcaaggtaccggagaatatcgtaagtttgctgctgcgcgcgaagctggacatcccgacgctagacatttacgctgccatcctccacgacgtgattgatgaagtgttcaccagcaaggcgccgtcccaaaacaacgcgcaggttgtattccactgcaagcgtagtcctgcgtgggcaaagttgtcggagaagacgcggttcagcagcggttccgagaagtccgactcggctcgtggctctgacgagaggagaagctcggtggacgagcaggccacggcaagcgagcgcggctcaacagtggagcaagctgctaccgaagccgaatctacccccgcagcggaacttttattaaaggaagagtctgcgcctgcgtcgaccgagcagccggaagcagcatctgagcgtccttttctgggcagaagcagctcggttaaggagaagggtgcattgacaccctcatcttctcccagtgaacctgccagcaagctagagtcggcagacgacgaacttgcaacgtctgaaaaggaagttggaaagaaggacgacgtgaaggcaacggccccgcctgcaatcaacacgagtgttgacacgaagtcagcgtctacggactctaagcaagcttcgccgaagaagtctgctgaggaatctccgaaggagacgccggacacgagtagaaacagcgaaggggatggctcgcgcaagtcgcactacttcaagaacgtgcttcagtcgcctgtgttcaagtcgccgatgcgcctgggctccgttattaagcccccggttgctccgcccgcacaggactccaactcacagtcgaacggagagaacaaccagcgtaactcgttcggatggaacagcgtgttcaagcgtctgcggaagtccctggttacgactcataacgagaagatagacaagaaagtgcttgctctgagtaacgaggcgtacgcctcgccgaatgtggctccccgccagacggacgtgttcgtcgtggatacttcccgtggcgaggacatcactaccttcgtaaagcgcgatgctggcgtggtagtcaccgacgttcctgctgcatcgtcaaaatcggcagaagcatcgatgaacgtgataacggctggttacatgtacaagaacaagtaccccgagaccggccaccggaacgtgtgggagcgatattacttcgttctcactcggtcagatggatcgctgagctactacattagcgaagcgcacgcgaaggaccgcacttttgtccgcggtacatcgcgtcctcttacagtgtcggagggcctccccatgcacgtgcaaggccaaaactgtgtgtttggcttccagatcaacacgcagggtcacggatcgtttatggtgttggtggactctatcgacactcgtctcacgtggctgacggagatcttggtgtgtgtgtcgaatgctaacccgtctccgccgctcccgaagcagcgcctatcactgctgcctgatgatgcaccgaagcagaggctgtcagcgacctcaagctccgtgggctcgctgaagtgcaacaaagaagagatgaaagagctggtgatggagttctaccgcaacctgtttggccccaacctgaagttctcgtcgccgctggacgcgccggcgtctttctggatggaggagaagatcgaccccgtgtcggacgggtgcgtgctgagctcgaacctgcctgactgcgtgccgtactggggcgagttccacggctacaagcggctgtgtgactactggaagatgcgtgacgagacggtggagcgcagcagtggccgcgtgcttcgtattctggtggacgaggacgaggagaccgcggtggtgatgacgtctacaacgttccgcatcctgcgcaacagcgagatcgtgacggaggagtcgtgcgacatcgtgagcgtgagcggcggcagcatcgtgagcatccactgcaccttcgactcgcaccgcatcgcccaagccttcaaaaagtacgcatgacaaggatatctcgtgcgtgtattgtaaagtagtctcattcgctaactttgtgctctgttgctgttgtttctcgtctgtgcacttgcagggagggtatcagcgcctcgtagacttccaccttcggttcattgtgttcgtgatatgcgtgcaagtgcgtgtacgtgtttggagcaagcaagacagacgcgcttgcgcggttctcccttggcgaaggtggaacagcggcagcgtgatgaatgaatcgatggcagcagcactcagacggcggagaggacgagcgtacgtccgtccccggcgtcgagccagcttccccatgtagagaccttgagcgagagagcagacagagaactatgttgtatcgggcgccgcgcgactgtaggacccggcagcccactttccttttaccctattaacgtttcctgagcaatagccaatgtcaacgacacgccggcgcttgcctttggtctcgtcctccagctaaacgtcccaccttgcactttagcgcatcaaaatggcaccagaattggaccacaacaaaacaaaacggcgtaacaagcgcaaatttcaccttgcattcacctttttccttgctttcactattgctcctatcgcaaaaatcgcactaggcgccaccacccgattcaagtgcctgctggccgcacactacccagcgtcagcttcactcttcatcgtcacatccgtgtccgatgctgccgctctccgtgaccctccgcctcgccggccgctcggccgcgctggccctgcgccgctcggcgcctctcgcctcgtcggcgcgcgtcatgcgcgtggcgcccgctcagaccgccgtggcctggtactcgtcggcgcccgcggacttcggctcggccgctgcgctggagctggacgacgacgctgaggtcgaggccgacgccgacgccgagctggagtcgctggccccgcagaagggattcgtggaccagaagcccatcgaggacttcgcgctgtcgcaggagacgcagcgcaacctgctgcgcgcgggcgtgacgcacctcttcccggtgcagacgcagtcgttcgacgtcatgatgcgcggcgccgacatcatgggccgctccaagacgggctcgggcaagacgctggccttcgcgctgcccatcgtcgagaccatcctggccaaccgcaagaacacgcgcaacccgcaggcgctcgtgctgctgcccacgcgcgagctggcgcagcaggtgcacgacgaggtgcagcgcgtggccccgcagttgcgcacggtcaacgtcgtgggcggcgtgtcctacacggtgcaggagaaccacctgcgccgcggcgccgacatcctcgtgggcacgcccggccgcatcatggacctcgtggacaagggctcgctctcgctggacgacgtggacgtggccgtgctggacgaggccgacatgatgctcaagtttggcttccaggaggcggtggagaccattctgggctgggtgcccgagggcggccagaccgtcatgtggtcggccaccttccccaagtgggtgagctccatggccaagaagttcctcaaggaacccgtgtccatcgacctcgtgggcgacgaggacaaccaggtgcccgccacggtggcgcacaaggcgatcaacgcccccgtgcgcgaccgcatccaggtgctcgagaacgtgctgcgtctgcacgcgcacgacggacagaccctcgtgttcactgagaccaagcaggaggccgacgagatcgccaactcgctgcccgggcaggacgcgcgcgccctgcacggtgacctctcccagggaatgcgtacgtccacgatgagcggcttccgcaacggccacgtcaagacgctcgtgtgcacggacattgctgcgcgtggcctcgacatcgccaacgttgagctcgtcgtgcagtaccgcctcccgagcgataaggagagcttcgtgcaccgcgccggccgtacgggtcgtgccggacgctcgggtaccaacattgtcttcttcgacggcagagatgcgagcgacgtgctcgactttgagcgtcgctacaagttcaagtttgcgcacgcggccccgcctcaccccgagcagatgatcgaaggcgcgctggaggacgtcaacaagcagctcacgtcgctgcccaaggcgaacgctcagttgttcgatgaagcggcccaggccatgatcgagcagcagggaccaggtgtgctgagcgctgctctcgctctgctgtgcggcttcgactcgaagaagctcacgacgctgtcgatgctcacgggacgcttccgcatgcagaccgtgcaggtcgaaggcgtgcagaacgcgcgcgaattgaaccgcctgctgtcgtcgttcatggacgaccgcgtggacatctacccagtcgatggtggcaagctcgtgtttgacatcccgcagggcaagctggagagccttcaggagcacctgaccgcgtcgtccgacgacgaagtgacggtgaccgctgccgtggagttcccgcgcctgctgatggacaggggcggccgcaacaacaacaacaacaacaaccgcttcaactcgcgcggcggacgcaacagcaactcgcgcggcttctccaacaaccgcttcggaggcaacagacgcgagggcggcggcaactggaagcgcaacgaccgcaacgacggcggcttccgtcgcaacaacaacaacaagagtaattacgactcgtccttctccaagggccgctcgaacaactcccgcggcaacttcggccgcttcaccgacggctggtagatcgatctttcgccgatagatagtttgtatgtacgctagaagttcatgacaatggaggcgtgcctcagcgacagtgaggtattgaaatgtacgactagtattgtcaattctgcccaaattttccaaaagggtgcggtttggctccggtcttgaaatcgagtggcgaatcgaacttcgtcgctaattggccaatattccctgaagtgcccgagtgcgcactccgcacagtcaatgcaagattgaggaagcggtaacgcactgtctatcactgcctctacgcgcacatcaagctcggctatactagaagccatcttgcccacgtcttcaataagaccgaacacacgatcggcaattggctgcaagcctactacgagaccggagtgttccagcgtgctcggaccactcgagagaggaagtacacgaaacagcaacgggtgtggctttttaactactaccaacatcatccactctcctacttagctgaagcccaggacgccttcaaacgaactcacggcaccgagatctccaagacatcagtgtggcgcatcattcacttgtttggtctgacgtggaaggtgttggagcggagggcgattcacatcaaggagcaggacgtcttccgtttcgtggaagagcttagtcacctcgactggagccaccacaacctcgttttcctcgatgaggtctcatttgacaacagagggatggttcgcaagcgaggctacgccgtccgagggaaaaaagttgccatccgcggcgacttcgagagaaaacctcgtgtgtcgatcctggcctttattggtgtcaacggcattatcgactactttagtacggaaggcactttcgatcggctagagttcaccaagtgctgtcaagacctggtgcacatggagagggggccgatacgccagtatcctggaccaaactcaatctggatcatggatggggctacaatccaccgacacccggaaattattcactatctacgaagcgtcggtgtagtggtgatcttcttgccagcgtattgtccgttttttaatcctatcgagttcctcttcggatacgtcaagcgctcctttcaacgacactactcggaagctagcgggcgagatttgactccattcgtcgttcagacgtttcaacgcttcagagatttcgacatgagcaaggtgttcgagcactgcggttggaagaaacaaggctacttcgatcctgttgtacctctttcaagtgagaacaaagccgaactcgctgctagtgaacgcaaccaagatgaattagagtttacggaacttgaatcgtaagagtagcttaaactcatcaacatgtaatcctttttctttcgtcactcggcgtgctctgtgtcttcgacgttctccatttgaaggagagggtcgatcacttcgtcgcgagcaggaggggtgatgtcgcgcagaaaccccatgataacactcttgcgcacctccaaacggcgctcattttcatcgagatactgtccgagaaattcccacctttggcgcagctgccggtagtcagcaattgtggccgccacaacatctagcgccacatttgccgttcgagtaacttcggccacgtgttgctccatctgtgtatccacgagtcgaagcagattcgcgatatactctggtggtgattgttgaatagcgacgtcccacgttgaccttttgagattccgcgtgagatggttggcccacagacgccaaacaacaccttcaccttggaatgtagccgcccattgctctcgaagtctctccacaacatctcgcaacgaggtctcagcggttgcgcccgcacgatcggtctcctcaggctgtatgcaggctgcgacgaattcatctcgatcttgagctcttgcgatcgacaaaccatactcgtagataacgagcgtcactgtatgccctcgcattttttgcagccactgcttccacgcttgtgctgacttggtagactccactaccttctttttggccctgaactgcatgacacggtcccactcgcccacctcgtgggtctcgacagaccactcgccgtccgtccgcaccgctctgcacttgacacggccactgaacaagctccagatcttctgcaggatctcgtcgaacgatccgccgttgacaacgacgtcgtcgagagtctcggccgacgtatcgcgttgggcgatggtcgccttcacgattggccgcaatagcaactggtacagatgacttggagctgcttggtctgcttcagttgttgcttcgtgcatgctctcaggccgtggcagcgacgtgaccactcgcgatgtagctggtgctgctggaggtgccgccaacaaaccaacggatcgtgcaggagaaacagtagcgggtgctgccggtgctcatgtcgctggaagctgctgcggccgaagcgctgctggggtcgcttgtagtggtcgtgttccttgaccactggcgtctgtttgcgatggagatgcgcgtggagccactgtgggctgcgaggtcgacggagagctgcctggcgtcggggtgcggcttcgcaatgggtacggcgagacacgcgtaagaatgggctggcgtggcgacctccgtggtgtggccaccatggtgcaattccagaactgcaaagctgcagcttccggctcccgaaggaaagcctcttatcacgcatatatttcattccttatgttaggttgggcaattggcaggttggtttcgctggatcgattcaaccaatcgctctcggaaattttgaatcgaacgcacaatagcttgcacttgaaaacgtcttcctcatggtcgtcctcatggtgctctacactccacgacaaaaagatatggacaccaccaaaagtggctgtaacttcgtcaatttttatcgttttaaggtgcggtttggactagagttgcagaacacgctgataaagatctgcacgttgctaacacgcgcgcttttgcgcttcttcaggtagctcacatacaaatcactggttctgcccaggtgacaaaacttatggacagctaatccccatacaaaatcctatattaaccaaaaacccttacaaatgatacgacttggactttgtatggggcgacaaaggaacccatgatttctccactctaccttagtactgagccatatatcatcgtccaacagtttagaatggagaaaacaatcgtatatccaagagatagcagcatacagagctacaaattggcactaactaggatgcaactgaccgtgcctcgcatatcatcagataatacatggtagccaccactcgaaatttcagtcgcttactacttgctcagttttgtgcgatggtcgatgtatttattacaggttactaaacacaccttctagtatacgataatgccatcagatctttgtctaacgtcgcgagtatcgccgtgaggctggttcctttgtcgccccatacaaagtccaagtcgtatcatttgtaaggggttttggttaatataggattttgtatggggattagctgtccataagttttgtcacctgggcagaaccagtgatttgtatgtgagctacctgaagaagcgcaaaagcgcgcgtgttagcaacgtgcagatctttatcagcgtgttctgcaactctagtccaaaccgcaccttaaaacgataaaaattgacgaagttacagccacttttggtggtgtccatatctttttgtcgtggagtgtaacgtgtttcaaaagtatctcgctaagtatccacgctcgatatcagccaatcagctcatgcgtctcttcgtaggatcacttcaacaccagagcaagagtccacagtgtgacccctcaactcaactggtccatctcgaccatgagcgagctgcagctgatcgtcgagcagctgaacaaggagccgttccgcctgggcctcacgctcgtggcgttcgatgagaagagcaacttcgagctgctgcagatcctgcacgaggtcttcgtcgagatcgacccgacgcgtcactcgggcgtggatctcagggccgaggccgacgaagtgcgggcgcagcgctacctggagttcctgcagctgctcaagttccagctgccgcgagacatcgacgggttccgagaggcgctggcccacggggaccggcagaccatctacacgctgctgcattgggcgctcaagagcctgcccgcgcaccagaagcgagcgtacctaggacgcttcctggcgcctctcaatgtgccccaagagtatttcggagatggctgtacgttgcttcagaggattttgtattaactttcacaaatgtaccagtgctgacggcggtgttgttgtagcgctaaatgccatgtacgagcactaccagcagctgcagaaccagttcaagacagtgcacaaggaggtggaccagctgcgcgcgtccaagtctcgtccgggtgagctgcgccgcgaaatctcccagctggaggaagagtcccagcaactcaccgagaagatcgccaacctgaagaagaagacgtcgtcggacccgggcttccaagagctgctggctgcgaccagcgcgctgcggaaggagcaggaggagcaggccaagttggcggagaggaagcgtgaccagctgctgtcgttgtcgctggcggagaagcgcgcgagagaaaccgaggcccgactgcaggaccttcgagcgtcgctatcgcaggatgccacgcctgagcaactctttgagaggctgcagtctcaggtggcacgcaacaacgacattatcaacgccaagttcccagcggagttcaacactcagcaggcgacgctgcagcgacttgagcacgcgctcagcgagccgcctaagacggagcacgacattgccgacatggaggacgaggtgcaggctctgagacgcgctatacagcagtatcaagcgcagatcgccgacgctcaagtcgctcaaggaagcggagacggcgaagacaagctggcggtgttccgccagcatgccaacctccaggctcgtaagcttactgagaaagaagacgagctggagcagctcagagcggacaagcagcgacttcaacgcagcacggaggagctggaggcaaagctggcgtcgatatctggcagcaagttcatgagtcgggaggagttcaagcaatacgcgacaacgcttcggaacaaaacgaaccagtacaagaaggtcaaagccgagctggcggagctcacagcggaaagcgtcgtgttgcaccgcacggagcagctcctcaagagtaaagacgcagacctcgaaggtttcctccgcgatctcgagcgacagaagggggttagcgggtttctggccacgcaagacaagatcgacgacgtctcggtgcaaaacgcgcgagtgaacgcgctcaagggagagacgctcgaagagatctcgcgtgtggtcacggacattaaccaagcgctcaaggagcgtaagaaccaactggccccgcagatcaaagagctgcgcacggtgcgtcaacgctaccaggagatggagcaggtttatctggagcgcaaggcgcagtacgaccacacggcggtcggactcgaagctgagcggctgaagctcgagcaagagtgcgctgccttccaggaggacgcactgcgcgaggagtcccagttccaccttctccactgccagctccagctacagcagggcaaggccgacaaaatcgcccaggagatcgagttcgagcagggctcgtcgaacgctcgtctgcttcgagacatccgctccttccaggagctctacaagcacaaagtggctcaacaggaatccctcaccaaggagctgcgcaagcagcagaaggcgctcaagacttcggccccagccaagaagcagcagcgagagatgttcgaaggattgctgcagctgctttcctgcaaagcgcgtctcgctcagcaagaaaaccaaggaaatggcaacgcgaaccggaacggtggaggcgtcggaggtgtggggcaggacctctttgacggacgcactgacatcgcgcattatgacgtgggtggagccaacgtcatgacactcgaggcctagacgcctaggaaaacgatcaagatgtcaactttcatcgcatcataatatatttcaattggtgttatcattcgtagtagctggccgtcttagccttggagactcgagtcttcgagctggcgttccagctcggccttttgcttctcaaagcgtcgagcaagttcttgacggtcacgttcgtagtcttcctcgagttggcgaagcttctgctgcacagatcgtagtgaagccacggaagcctccgccgcagggccagccgcacgaatcgtggccgacttggaggaggaactggtgattcgtcggaagtacttcatgaaggaaggctcgttgctttcggcctcgggtcgagcggattcaccttggctgctgccgcggctactgctgcgactgcttgttctggagttggaggctggcatgacgggagctggaggtggacggacagtgcttgatgctgccacggggatcatggtgccgtacaagtcgctggacgtgatctccctctctcgggtctcggaactggtgctgtccatagtggagttagtggacttgttgtcatcacctctgtacaccatcgtgccgcagctttcgtcgtctgcagaggcactggaagagaagacggtggtgccgcctccaaagctcccgtagcccagtgaggacgccgtgtcgctcgaagaacggcggacggacgaaaagcccacagcagtatccgaacctccaaagcctccaaacccaccagtgccgctgctaatgatggagccattgcgcagcatggtgctgatgtctgcaaccgacagcgagccatcggggcggcctgtggcggcaccacggaactcggcttcatcctcgacaccccgcagtcgagcctcctgcacaagctccaaactttgctcgaccagttcttgaagcacgggtagcccagccatgcgcgtgccacttgccgccgaacgatcggagttagcacgcagtcgctcgacattgcgagcgatgaaagggtggcgcagcaagtcttgggccgaggcgcgctcctgtgggtccttcttcaaacaaacagccaggaagtcgcggaactcggccgagtacttgtgaggctcacgaagctcgggcggtgcgcggttcgggatcaggaagatagcgcgcattgggtgcatgtgggctagtggtggttctccttcggccaactcgagcgccgtgatacccagcgaccagaggtcggccttgcagtcgtactgagcttcctggatcacttcgggtgccatccagaatggtgttccgatcacagtacgccgcttgcctacggttgcagtgagctgcgccgacacgccaaagtccgccagcttggccactccgtcgccgttcagcagcaagttgccagccttgatgtcgcggtggatcagccctcgggagtgcaagtgcgcgagtcccagcgcgacattggcgcaaacagcagcgatctccgcctcactcagcacatgacgtccgcgcagtacgtgcaggtcggcgagtgacccggcagcgcagaactccatggcgatccagagctgcgactcgtacgagaagctgccgcagtactgcaccacgaacggcgactcgcagcgttccaggatgcggatttcgcgcgtgagctcatcgaacgcatctcggtcctcgctctccacgggcaccaccttgagcgccaagacttcggcgctcaatttgttcacagccttgtagaccttgccgtaggacctacatcaccacaaaaatgcgcataagcattagcaaagacctcgacaatttgagacagaggagtggagtcgagtttttgatggatgaatgaataggtgctcgctcacccttcaccgatgcgttccagtacttcgtacacatcctcggggttttcgttccgctggatgctcgccatgacgcagacgcactcgctcccaacgcagaattagcaatggccacgcggtgtgaaaagtttgagcgcaagcatcaagttcctgccggaattagatgcggctgaagctgcagagcaaggcagagcagacaagaatacacctcctcacgcaatgaagacacgcgctcaccccgcctcgaagcaacttcaagaacgcaccactgcttcctagacctgggcactcgacgccataagactcctgctatttccagcagagcagagcaacggacacacaagaacggaagcgggcaatgcaataatgatcgagacagagttgaacacggggagacattgtacgtacgcccttgttatcgctcaggacgacgggacactactctccctatccttcaggtcgggttgccgtgtcttggacgccagaagctccgttatttttttcttcttccagaagcttcgtcttccaacatggaactcgcttcacgctctccgtgccgtctgctattgaaggtggcgagctgattgatctagcgctctacacatcgggggggctgcttacaggaccatgagctcggggctctccatgtacgccttgaacacctgcaggaactggccggcgatgacgccgtccaccacgcgacggtccgacgacagcgtcacgttcatgaccgtggcgagacgcggctccgggttcacaccctccacgatctcaagcggcggcagcacctccctgcggccaccgccgacggccaggatgcaggcctgcggcgggttgatcacggcgcggaactggtcgatgccgaagctgccgaggttggacacggtgaaggagccgccctggaactcctcgggcttgagcttgttctggcgcgcgcgcgagacgagctccataaatatgcggttgacgccgctcaggccgagggtgtccaccttgggcacgatgggggtgatgaggcccgtgggggtggccacggccaccgacacgtccacggacgggttgggcttgacgctctgggtcttgacgtcgaagaagcagttggcctcgggcacgtcgcgcagcgcgagcgccacggccttgagaatgaagtcgttcatgccgaccttgacgtcgtgcttgcccttgagctgcttgcgcagcttcaggatgttgtcgatctcgcagtcgatgctcgtgtagctgtgcggcacctcctgcttggaggcagtgaggcgcttggcgatgatcttgcgcatgttggacagcggcaggtcctcgtactcggcgtcggcagccacggcgggggcggcagcggccacgggctgggcgggagcagcggcggcgggcttggcgggctgctccaggggcgagtggttgaactcggggatgagcgcgcgcttgccgaggaacttgatgagcggcacgcggccgctgtgcgaggcctcaggctgcgcagcggccggggcaggagcagcaggggcagcagcagcgatgggcgcctccggctccgcagcgggcgcggcctcggccgacaggttggcgagctggccgctctccagcagctgcttgtacgtgtccaggtcctccaccgtgtaggcgagcagcgcgccgatgggcaggtcggcggcgccctcggcgcacacgatcttggccacgacggcgtcgtcctgcatctcgtagtccaccacggccttgtccgtctccacctggcacagcacctcgccggcgtgcacctcctcgccctccttcttgagccacgcggacagcgagcccgtctccatcgtgggcgacagcgatggcatcgtcagcggcgacacgccctcgggcagcgccgacgagaacgcgcggcgcagcagcggggccacgcggcgctcggcgcccgcggcggaggccagggcctgcatggagcggctcaggagaacgcggcgcatcatgttgcgagtgtaggttggtggctcacacctattatgcggaaatgccccattgtctggggctcccaagcaccaaacgagtggccaatcccactgcgctctccgcgtactatggccgtttgtatgggccgcagctcgacatagacaatcgcagtcggctccttgatgggtggggcttgccggcgggatgtgatgtgcacacggaaatttggtgtagcgatggtgtagcgcggtgcgccacatcatttgagatactaagtacgaatcgggattgttttgtattcaattgccgtttgcagatattttggccaacgcatgcttattatctcgttagtaatctcgattttaatccagccagctcttaattaagacctaggtctgatttatatatatcgccagtacggtctaagatccgagcttggggctctgttttctcgaccaaggcgcttttctacgacttggaaacgcagaaatgccattctagacgggccaaaccgagtttctgggcctaaaagcggcccccagcaaagcataaagctaaatcagccctcgcctatctcgtgtccactcatattaagagacaggcgtggtctattttagaggtctattttagagggcaaagtatttgcaagcggcaataacccctattgtaaataaaacgctcagtgcaagcgctcaaccttcgatagctatagtacctacagtaatgattctggcccagactaaatctgaatagcagatttttcactgcgcacaattattagtctggcgccaacagtgacagactaattttgaaacttcagactaattataaatatctaaaatgtccgttttccagtaaggaaagcattttgtttgtgaaatgatacgtttatacgtatttttcgattatttttatagtatagctatactttatcgcggctttgaagagaaataaagactaaatcatcgcagatgctgcttctctaatggttagataaggctaatctatgggttggatgccttgttcactcaggtatctattatattttgcaaatatcaggttctgtgtgcacgagatctggtaagttggctgctgtcaagtgacttttcaactagcgatgcatcaaagttggtagagatggactagaatcgtggccaccacgacagactaattatgagcatttttagccagattaatataatagtgaagacgccaatttttgctcgacacgaattagtcttggccagactgggccaggctaattttgaagccagactacttttgagcccagactaattactgtaggcactgtagcgccgtagggtgaaccaaaccacatgaccaccttcatttcgaatatcacaaaatgtactgtaagatggagtaagccctgtgttcattaataaaatatttgactcaaattcgaccttacccacccgcagcccacctgcagtggcttcaccaagcaggtaatgttctgatatccggaaagccggaaaattgacagatcagcttcaacgcaatttgagaactttaattactggactaaatcgaagttttggaacccaaaagcttgggccaaaatatgaacaacgaagggtcgcgttgttccactggacttgagtattggaacatccgctggtaatttatccgtaatctatccggctattatcagaattttcttgatccaaacccggatatatccagcaactaaagttctgtaataagacgaaaccttgttggttcctattgcaccagtcagccggcggtgtcaattggtcaaacaacaagctgtaaggacttgctgaaataagtcacgaatttttcacttgatcgagtacactacttggagcaacatatatttaaaaatagggctgaaatcgggtttagaatgtggggacggcgcctaacaagttgaaatttcggacctaaatgtatgcatttaaggtacattatgtctagggtccgaaatttaaaattgattcgtaaggtactgtacgtaagtaattggtaaaaatagatatttatttatttatttgaagtgttttcagagcgaataagaacatccgcagctcctgctcgcacttcatctgctggtctcacgctggatcaagccgatgacgtagcccggagttataagtcgacttcgccctcaggaaagccgtgtccgtcgattagctcgctccccagctcgacgcctcgaataccgaagttgcgacttgtatacccgcatttgtgtacgtgtgtatcccgatacatctcgatctcagcgggtttcaggttgaacagcaagttgatctttgtgtacaccagcccgttgtcctccggtgttacgctggttataagccccaccgaataatcgtatagcccgtacttgttaaagtagcgggtcatgcttgtgttgctgccgtcgccaaagtgctatgagagacacaccaacacgcacagcacgcacgcgcggatctggatgacgccgaccggcaaggctcgcttcgaccaagaggacagcatttggctagagtgtagtgatcaagaagtcgtcgggcagacacacaggcatacagaaagaacaagatcaggaagcgtgctcgcgaaatggggtcaagctttgaccttgatcggctttgcgactgggtgactccacgatacggcctcatctggcaaacgccgttgaaggagatcgtggagtcgcctgaccaagtgtgcgcaaacccgcacgccaaacgggtcactcgatcgaaatcccggagctggacaagtatgtattgggtcagctgaaggctgagccgaatctacacaacgacgtgctgaagtgtggggtggtaattccactaaaatcctcctctaccaaaaggtattagagacaccaacaacacgctaacccgcaaaggtaagcgcttattggatcaaaacctgaagaccaggaacgatcccttacaccgggtcggttgcaagcgcctctgtgcaacttgaacgacggctcgttcttgtgtaatatagcacatcgtcctcgctcaacacaaattggtccgccattttccatgcatctcatgctgttctgtatccaatcttcgcatcatctccccggagcactgccttcagattcaaccaccgtaactcttcatcttgagcggaggcgattctccttcggcgttcttcctgtactaccagcgggtcaatgtcttctgcgttcggtggggctggtgaagtctcggcacgcagcggtgaagcttctgcttcattctgagactcgttcggcacaccattggcttctactcggtgagatgcgtctccctgatcggtgaccgagacttcatctgcaaaccggacgtgtttctcctttgctctcgtttgacgtctggtcatcacagctacgtgtccgggttcagtctcgttctgccgtctgcggtcggtttctcttcgcacaaaatcgaaaaaattcttgctacgaggtttggcagaagctaccacggcccatactgtgttggccgagggtatgtcctcgacgacgcaaccgtcagcagcctcgtagatgacttcagcgatacggttcagcttcatcagctttaatactcggtcgtccgacgataccaccgtagactccttgcactcgagagtctcgcttgccagagagtcggccgcagcattaaactctctcaccacatgcaggtacttcaccgaccgaaggttggccgtgagttcttggtggtggctgagctgagctgttgcagcaatgactccttccgacaggctatcatccctagggcttgctggatcgcgagcctcgagtcgccaacgacaactagatcgtcggctccatactgtaatgcagcagagacgccgttgttcatcccggtgtactcagcgaggttgaccgtggtgttatcgaggtaagcgctcgcagcaagcactactgtccactctggtagcttccatagtatccacgagcaactgccgtatccaccgttcttctcggtcttcgcagacccgtcaaacgacataacgaagcctcggtaggaccgcggtaggcgtgcgtagagcagatgcgggtccaaacgagcagttggtgacccccgtgtccggggtgtgaccaacgccagtgacttatccaagtcaacgaagttcgtctagccggcttcaagtagctgatcaaacgaacagtccgtttctttgactcgttcgaccaacaggtgccacggcgacagcaagacggcgaactgggtagcccgaccgaacaatgtcttggacttgtggacccagtcgagtgtcgaataccgagtgtagacccggattcgctgtccaacgagttgagtataacacaccttcagtatcagcagaagcgcgaggacctctttctcggccgggtgataattcatctcagcatccttcaaaacacgtccgcagaagcgaacggggtgtagtttgccctcgtgctcttgcatcaacgtggaacttaaagcccactggttggcgaacaacatgacatgcacttccttcttccggtcgaagtgtcgtagtatcggtgctgccgaaaccttctgttggagcatcgcgaagctgtgcttggccgcggtgaggccacccccgggctggaagtcctcgtccttaagctggtatagcgctgctccatagaccgcgaagtgttggataaagcgactgtaatagttgagtgccccaaggaaggactgcattcatttcctcgttgacgggaacggaagctcggccaccccagccagcttcttagcgtccggtcggataccttctgccgagacttcgtgggacaggaagtctaccttggactgcacaaagatgctcttcgtgaagctgatactaatacggcactcttcaaaccgtgccagcaatcggtctagcgtcgccaagcacgactcgaaagtctcggcaccgaaacagatatcatccacgaatgacggcgactgaatactggtgtcaacgaggaatcatcgggctccccgttggcgaacatgtcggcgatagggctgttgaccagttcggctacagctcccttaccaagcgagttatctcggtcggcctcgaacttggtccggaatggctttgccgtgccagtcgaagcctcgttcaccccagcatgagcttccatgtcatgttcttcagctagacgcatgcgctccgagaatttaagccatccccccgtcggttggacgaagccccaaagcccgttgtcaatcatgcgttgatagatcatcggtgcgttcttcaggcctaaaggcacacgcaaccatccgaagtgccccagtgcgcagacgaaagcagagatcttccgagctcgttcggtcatcataatggcccagaagtcgctagcggcgtcaagcgagcaaaaccacaagtacgcctccatgtccgtcagcaagtcatccaccaggggtatggcgtaatccataatctcggtgatcgcattaacgagtttgtagtcgatacacaggcggatatccaccccattcttcttcaggacgatgacgattggcgacgcccatgggctgtccgagaagtagataagcccggccttcagctgacccttcagcaattcgtacagcttaccgaggaagcgaagcggggttcgccgagccttctgcttgattggcgcgcgcccctgtacattgatgtcacacacgaccccgtaggctggaggcggcagggcgttaccgctcgcaatcatgatcttctcgtggctcttcagtacatcgaccagggccgtgtgctgcttctcgctgagttcgtcactctggacgttttgccacgagtagtccagcgtcgtctccgacgcttcggttaggtccggcaagaacgccagctcttgcgcgtagtcggtaagctcaatctcgttcgcgacgtgctccgaaacgtcgttcacggtgtcatcaccttcgccagacccttctgcaaccatggcatgcatgaccgagatataggtcgcctccagtagctgctcggggtcgtcgatcgcacttagatccgaatcatggaattcagtgtcggcgtcagcggtggaggttccggcttcagtaggaacgtcgttaggccctgggtcgtgttcaccccagtcgacttcgctactacacaccgcagccgacgtttcctctagctccaggctggacgcagcggtccctgttggcaggacatcccatgtagttgtctcggccactgctaccacgtcgcggtcatcctccgaaccgtcgttcgtcacgctgtcaccatcactcagctcatcactggcttccgatgcctcaaccgaggcgtatgtcgctccctggccggtggagtcagcaccactgttcggattcacgggcaggcaacccactcggctaggcggcgagtctccgggtacgtccgagtcatccgacgcgctggcctcgtcgtccgaaccatcgttcgacccaccagcacgatccacatcggttgtatcagctcgagcgacatcgaccgagccttcactgaccctggggtcgtcgtcgtagccatgtacatcgggtgacgagtactcatcatccaacggagcttgttgacggccttctggccatggcggtgcatccggtggcctcggcaggatctttcgcggcgtcgggtaagttcggcgctcgaccgcaggcggctgttcagccaaccattgctcgtagagacgacgttctcgtccttgcagagtctcatcacgactcgttgaataggccaacacctgccactctttgtacttgttagagtccaacctcgcgtagccggtctctcgcggtagttcaccatgcggtacccacagcaccacggagtcatgcttggcgcactgtgccgctgtggtcgtaatattggcgagccgtacacacgtcggctgcccccgtcgaaacctcgttacggtcggcacgagcttgcccgtgcgtcgtacccacacatcgtactccgaacgaggtagccgctggcgcggcagtcgaaactctcgccactcgcgaccgggtacgtatagatcctcgatcggcccacacgaaggctgcgtgccgtaaggttcgtcatcttcagcactctgcgactttagcagtggtaccatgacctcgtccggaaggcgtgcggtgccatgaaatagatccagccggattccagccgggatcatgaagtccatcccaaggaccacatccaccccggcactgtgatccattatccacatttcaaattcgtaaacctgctcccacccgagggggatcttgacgagcgcccgtcgccgggtctccatcacccctgggttgatgccgcggacttcgagacttcgtccgttgtcccggacttctcgcacacgtagccgcttggcaaagctggcagaaatcacgctaacattcgctccagtgtcaaggagtatcctcgttcgcgcgtcgtccactgcgccattgaccaaagccctcattcgcttcctcttgtagtatcgttgggacgaccaccaccccagtctctcaccgggcagtaatctcaccgcccgaacgaggttccgaagtggtccccttatctgggctagacttgtgatcaaagcctcggtcgggtgtccatcacgttcatcatcatcatcttcatcaataccaatcgcaacgagacttgcgtcccggttctctccattttccgtcggtttcacacgttcattgttcttcaggtcgtcaggccgtttgctttcgcccgcgaacgcgaacagatagtccgcatcaacagcaggctcagctaactgtggcagcccgattgggcccaacccagtttcagttggtgggctgcctagtttaaatggcttccatacaccaggctttgcagctctggcgacagatccttcttgtcgaccttggacttcaggagcttggtgagctcgtggagtgcttcacacttcccagcgtcgtgcacctgtttgcaccgccggtagcagaagtgcaccgagtgggacgggcttccgcacgcggcacacggcccatactggcgtcgaccatctcgttcacggttggacgggcctccttcgttcctgaagcgtcggttatcagaccgagcgaacgttccttcggctgcggccctgcgctcagcatcgttagcagcagcgacatgtccggtagacccatccgagtcgtaatcagcgtctgaatcctcgtccgagcgttggtcgtccgagtattggcgctcatcctcgaagtaatcctcgttcgtctcagcatcacgtcggggggcgtatggagcctcgttgcgtgcaccgaccgagcctccgacgttccattccgtcatcacatcggccagcgcgtcaaccaaagtgactcgggactggtacggcgattcatcgcgtcggtcacggcgacggtcgtcttcactgcggtcgttgcagcggtcgttgtcacggcgacgtcgttcgcgacggtcttcgtcgtggtagcgtcgttcgcggcggtagccaccccgagaatcctcgttcgacctcgcatcgcgtcgacgtccatcatcttgactccgagagcggcggaacgacaattctcggttcgatttgcggtcacggtgacgcaggatgtcgttgatcatgtcttcgaggtcatggatgctcttgacccggacgtggcacagacggtcttctaagtttcggtcgtcacacgtgaccaagaagtggtccacgtggtccttcatgtcacgaccaccgttttcaaattgcacaccggcgttgcgagcgtagccgttgagccagttgaggtattcacaaacgtgttccttgtcttgccgagtagtaccgagccttcgcagactgggaaaacttcgagcaatagtactcgatgaacgcctcgctcagcaacttccacgtgcgtcttgtcttgcgtgggagcggacgacaccagtgctgggctccatccctgagcttaagttcgaacggcatacaccactcgttgggtggtgcatgcgttcccttcatctcatagatgaacgttcggagccactgcatggagtgctcgctcttgtcgcgcgttccgtagaacggcttgatgttggcgagaggcaaatgcgtggcgatctcgagctttggggttgagctctggttgtcggtcgcgcttagctcgcgcacctgacgtgcccattcactcggtaggtccccttcgtagtagtcggacccgaggtcgtcgtcgctgtccgacgaatcatcttggaggtcgtaacgtcggcgggaccgacgaccagtcgctccgcgcgtgccaggcgtggcgaatgaagcctcgttctccctagccaaacgttcactacggtccgtagatcgtggagttaccatgtgcgagtcttgcatgtacggcgaggcttcgcccttggttgcaaagacaccgtcatcagtggctcccttccgaggggtcgctggtagcgggaccttcgacgggtctactgcctccgaggtcgaacgaagcatcgttgggcctcgcgaactgacgtccgccactccaaaggcattacgcagcttcttcctccacttggttaacgctgtggtagcggcggtcggcgtccaactcgcgagcgcagcctccgtggggaggatctggggttcgcaccccatagctcgcaggaggcccacagtattctgcgcaacgtgccgagtgctcgttgagttgatcggcgtagccaacgcccctccgaggtccatccagatggcctggcggacttgcttcggggagaacaactgcatccattcgctcttggtcttcatcaggtctaggcaccggcctaggaccttgttggccgccggattatccccgttgaggggaggacgagtgccaaccggcttggaggttgcccctcctaccgtcaccgagggtttgaagtcctcggtggcgccgtcatccgcgtcgtaggagggctcggggcccggcatgtccttgaacgtgtcggagaggtcgcggttaatcgaccttgatcctccactgcgacctgccgacacaaccgcagcttccgaagtctcggacatcgccgtccggacatcccagtcatcatcttcgtcatcttctttggcgtccgaggaatcaatcgccgtgtcgtagctcaccgaacgctcgtctatcgactccatccgatccgtcgttggggtcgataatgagcttccggagcgcaccgaagtctcgttgcgcgttccactcgacttggccggcgttgctggtaccgctgacttgacccccttcgccatcttctctcttcttcttcttcttcttcttctcttcgctcgttgggggtaaagacctacaacaaccaagacacacagaaggtcacaccaatcccaggtcgcggcaccagttgtggggtggtaattccactaaaatcctcctctaccaaaaggtattagagacaccaacaacacgctaacccgcaaaagtaagcgcttattggatcaaaacctgaagaccaggaacgatcccttacaccgggtcggttgcaagcgcctctgtgcaccttaggttgtgttcggtcaacccaaaaacctgtaccactagccacgagcttaggctaggatattatgtagcgctttcgcgtaaccccactgcagtccctcaggtacggtctcatctcgcagacgacgttgaagggaatcgtggagtcacctgatcaattgtgcaccaacccgtacgtcacgcgggtcactccatccaaaactccgtagctggacaagtacgtattgggtcagctgaaggctgatccacaaccgaatctacacaacgacgcgctgaagcgactagcatgcgacttcctctacagtacggtgggctagggtgaggagcccaaagtgtggtcgacgtggcccatgcgattccggaagcggtatgggctggaggctgttctggatgacatcgcagcggcggtatcggccgttgccgctgctattgctactctggatggcacggcagctgcgcgtgcacgtgctgggacgaccaacgcggctaccgccgctggcgtggcagaacgtgacgagccgggtgcagaggctgtgagtgcaacgacagaaagttggcaacgcgaagtcgaaaacaccatgggtgacatgaagcgcaggatcgaagtgctggagactgctcgagaagaaggtggagacactggagactgcaaagtcagacctcgagacgagggtggatgagttgggagcagagaatgcggacctaaaaaaaagggtggcggagacgaaagtaagcacggcccagcttactatgactctcgatgcctttgtgcaggaaatcattaagccagccgtgcaggacccgatgcacaacggggaagaccaaggccatgaatcgcacgcattcgctggaggtgcgcaggcagagtacggacagtgtatggcaagtgcagacatccccgccatcaccccacctccccagaaggcaaaacgcaagtcgtcgacgggttcgtccaagcgcaagaaaccgagacagacaccagtggccatcaacgaggacgaggccaagacggagggcgaaacccacatcaaccgctagcatagtgaaggtagctctcaaggtatgggagatcatttgtcgtagctacgttttctcttttttttaactggacgttccttcaacaatgtacgggatctcgggaaaagaataaattcggtttttcctggcgggtctaggaatgctgaaactttgcttatctactaatatgtccatcaaaggagtaatgccaaagtggcttctccttttcttgccccgttcggcaacgaggacatggagcgtagcccccccccccttactatttgtgtcatcttatcgctagtaattcgcgatctttcattccaacctgaaaggtcacacaaatacatatagctttttatatgctgcataaataacggtaagaaacatcgcagaggcgccaggcaacgccaactttgaggataaatcgctcgagatctacatacatttagcgcttcatacagcggtattacctaagctagatgcagggcgttctatccatgtcggtctcaacggcaatgttcctctcattgaagagttaaattcgccgaaatcacaggtttccgacctgtcatgtacattcatgaagggacgcccagttaagcatgagagaaaaattagccaccatattaaattgcatattttcatgtctgtttagcactaaaaaatcgaatgaataactgcatcaaccagatgttgcaacgttgtgtaactattacagctaacatgtaattttcgggaggagcggtcagggggctcccaagcaccaaacgagtggccaatcccactgcgctctccgcgtactatggccgtttgtatgggccacagctcgacatagacaatcgcagtcgcctccttgattggcggggcttgccggcgggatgtgatgtgcgcacggaaggttggtgtagcgatggtgtagcacagtgcgccacatcagttggggtttcatctaactacgaaaaccgtactgacaaatcgacagtaagtaattgaaatgttgagaacttgaggagcgatatcgcttcggacctcaacgtttatttggggcgtgtgatttatataattgttcttcaatttgttcgtacactttattgtcgtaaaattcgcattgaacaaaatgttttctgctttattcgatttattttttcactttaaaacttactatatccggaaatgcggaaaggccaacatctggctggccagcttcaaatgcaattatctcgaaaatacaaatacccacgtgcttagtaatcatttggattttcgagataactgcgtttgaaggtgttcggccaaattttgcttcattttaacaatcgcttcggaatacaactgtagctgtctaggacctctcggtaagttgagccattagatcgtttgcgctaaaaattactgggtagcgatattagacatacgtgtgtaacaaacaaattgaggaatattcacgtcaagcttaccttgttggactcggtggaagccgagatattaggcggtgaacgtcttcgctgcatgtcattggctattcgaaccttattttaccacttgacaaacatttagttactgaaggggtgtagtgttgctgtgtagtagacatgtggcttacactaagttcgactatcaggatgtcgcagcttaagccagcaccaaatgcttaaccacgaaactcgtagcgcaaaactcgtgtcgtaaatgacttatcgggaaggctacagttgactcccgaacccattgttaagcatcatttttctgctgcgacaccagtcagctggcgatggtcaaacaagccgttgtaagggcatactcaataaatcataagtttgctacttgaacagttaccgtacttgaaacgacgtatacatttcgaaaggtggtgaaaaacggtttaaaatctgttcagcctgtgcgggggtaaatcacttgattatagtataggtcaatactaatccaaatacaaagagccacgtgtgtgattcccatgcaaactcgaccccgatttatgttattctgcacccagccttccatccggcttggatcctgcctaccactggctcttcttcctgcccaattacccaaaactagtaattgtacctacgttttggtacgtatccactgaggctgagatccggtgatttctgggctaggataatggcacggcgcagcagccacgccggaggcccccgtgctggacgtccactacgaccctgcgcatcggctagcgacggtttagattaatagggattctgaattctcaaaactttatgatcattctaaacttcgtgagctcgaaatgaatcaaaatggataaaactcgagctcggactcggcgtcttagcttcatctacaatggtcaaatctgccggggttccgcgagaagttcttctcaccctttgcgccccgtttagcggatagagggaagccgtggtgatcaacgttatgtataaccacagcactaactacgatccctctgacgatcaacacacagcccacacccagcgcgctgatctccacggcttgtagctcgacgagtttcaagtccggccaacgccacggaagacgagggcatggttgacttcgctcccccgcctaccgcccaacaagtccacgccctgcgctcgcagttacgacctacgcccgagaccaacacgctttactcacgatcgcgttgaaagaggcaactaatggtcatcaacacatgctgaccgtacctgttatcacgcggtggcgctccatgcacgtttagtgcgggctttcgacaactgaaacgagctccggaagctatctgccgaaccgcattttgtagatttgggtaagtactcatcttcgccgaaggataacctcagccaagtgaagagatatattcgtcaggtatcattctccaggagcaagttgctgcatttctgggatgtgttattgaagcactccgccaacatgagtccgcaattgtccgacttctcgccatctccatgcatatggtacggatgatgagcagtcagtccttcaagcggcaactaatgcacttgttaaagatcgatgggagtacgtgattccgataccactagcttggcatttctcctagacccccacacaaattcgaacaattcttcggaccgatgggcggtacctatagacagggttgcaacttcactggacggatcgaatcattgcaggagttaggcgtcacgagagcagtgttcattggtgcactaaacgattttgtagattaaagcaacgatggccccctgctgacaaaataacgagggagtagaaactatcacctggtagtggaacaacgagaatttctttttgctgtcgtggaagcttgccaaacgtgtgtttgcccgttttcatcggtagcgagcgaacgcgcttggagcatcatggacttaattcagttgatgaagcacaaacgattgacgaccgctaagacccgcatgcttgcattcatctacgtcaaccccaacgcggtctcgagcgatcccccggattgggtacggcttcactcatactcggagtgctcataatctcttgaacgagaaatgtggggtggttagggcggtctgagctgcctgagcagcatgtcagtactatgaatgtcataagggattattgcgcaatctatttttaagctgagtggtttttatctattttgagctagtgcgcaggtaatattacatgaccgaatcgtttaaattggcttcaatgtggtatagcgatttctgagtccggcagccggtccgacccaagtgtgtacaccggacaccaactggaggagtttcgccgacgcaggatcccaaagatctcaagggtcgccgagcaaagagtcggcgagcgagcagacttggttttagtattagagaggccgtaacagcccattttcattagatatttgtataggaaccccagggaagggcctttgagtccaacgaagcaaagataaatacagagtggaattttcgaggtcctaaacaagcggcacgcggcgtctcttcaaggtacgaccgcccccgtggggctagattatgacaaccgctgagatcggctatccgaagtgacggaagtgttctcggccgcccggtgagtccaagagcgagtgcgtgtagtggttatctggattccgcccctggcgaagagctcgtcgagcgtacgagcgcgtgttttcggcccgcccccgacttagccggtgctgttgtgcatcggcgccccgtaaaaggcgagagccgccgtccatcctttggtggagggcacgggtcaaggagagaaggagaaggagaagaagaagcgacaagataggtcggcgaaggaagggagcgtgctgtgtgctcgtggcacggctcctgggacgacttggcaggtgcctgggtaaccactgcaccgctgtaaacagactgggcgatcttcggatcacccgacaagcctgcgctcccgttagtgttggtgttgttggtgcgggggtgggaagctaacgagttttggcacgtctgctacaccacaactggtgccgcaacccgggaacagggtgtttgtggcacttaggtacctttcaagtcaacgagcaagcaagtgaagatggtcaagacaccgacaagcgcgcgaagcggaagcccggcgacggccggagggaggtcaagcgcgcggccgagaagcgcggacgccgcgacgaaggcgacggccagcacgccgcgctcagtgaagttcgaccgggtcggcgatcgtgatcatggaagtggggttgacgatgatggaagtgaaaaagaagtggagatgaagggcccagcgccgatgctggaggatgaagacgtcgacgagcttacggttgtcgtcgagaagtcgggcgccccgcgcccgatcgctcgccggcttgatgcagaactcggcgaagttactccagccaaggttctggcgcccgatgagcggccgatcacaggaaatcggccgccggtgaacggagctactccgaatgcgtacaagatactgggacaagtcggccgatcggtggtcgctacaagcacgtgggtgatgatgttcgcgccgaaggaagtcggcgctgccaagtgggtgacgctcaagagagagctggcgtctccgatcgacagctccagcctgttccaactcagcgagcagaccaagcgtctgctggtggcgatgggcttcgagtgcaccagcgtcccgtcgaaggtggctctggaagtctgggagctcgccgaggtaagcgccgagctgaccaagtggaagcgcaagctgaaagactctttcggggtgcgtggaacgacgaccgtgcggaagctggatgacattgacccgagtctggttccgctgccgacgacgccgcggaaggcttccgcgggctaccagatgcagacgccggataccaagcaagtctttagcaaggcgcccgactcgccatacttcgcgggctcgcatatggtgacgccgaagaaaaacagtgaaggtcggcgattcaaccctcctgcgctcgcgggcgatgacgacgacgatgacacgggctacgacttcgctgacccgtgtgaagacttgacggcgcagatccaccgatcttaccagcgcgaagacgaagacggagctcagcgagttaagctgacccaccacatctccctgaaccagttgacgaagttttccgggactcgaaaccgcagtgagcgatcgcttaagaagttcatctacgagatggaaggaaccaacaccccgcaagaccgctggtgtgagccgttccaactcttgatggagagcggagccagcaactgggttcgccagctcccgaagaagacgcgcaacaagtggtccctgctctgcgaggcgttcatggcgtactactgctcgcagcgcacgaccaatctgccgaagatcgatattacaccgccacgcgggacgagggggagcacatttgcgactacttgctgcgcctgaatggatacgctcgctcggcgaagatctggtggcaccgtcggcgcgaggcatgtcaagcgtttcctcgacacttgtgacgatgatgcgctggtccgacagttgatccctcaacgattcgacagcatcgccaatgtggaagccgtgatcaacgacacgatggtcgctgaccgacgtcgcaaagacaagcgcagcacgcgcaaaccatcacgcgatgggggccgacagcgcaagacgtgacgaccgtcggaacgaccgggacgatcgccgaggcgatagccgcagccgacgtgaagatcgctacgatcgccgagtcaccgtcgcaagtacgtcggtcgacgagctctatgacgcctggcaagaccgcatgtctctcacgcctcgtcgccgtgtcgactcagatgattactcggagggaagcaatcattccgactgctcatacaactccgagtatgaatcagaaaatgatcacatggatgtggctgagacgggccggagtgtcgcaactcagcgatcagacggtcagagtcgcgcgaatgtaccgggcgacggacgtcgggacgaaggccgccgaagccgatggaacgaccaagaacgccgtggacgtccggagtatgggccgtgcgccgcgtgcggcgacccacgtcactcggtgcacaagtgcttccggcggtgcaagttttgcacgcaggtgcatggtgctggccagtgcgagcaccacaagctctacgaggaggctgtgaagttcctgaagtcgaagcacgacaaggactcccttccgtccgagctccaaggcatattttccagcaatttaaacgagcgcgcccgccaactataactgggttgggcaatgacgggcggccacagttgtctgagccggcgattgaggcgaacttcgtgttcgcctttgtccggctgagcaaataatggctgccagcaatgagagttctcaactcttggacatagtccatcaactccttcttgctctgcctggtcgccaggaagcgtgagcgcacgcgatacgcctcgttaggcggagcaaacactcgggacaattgctgtttcagctggtcccacgtcgggaaggccgcctcgaccgacatcctggacgttagtgcccactctctcgctcgcccaccgagcttcgagacagctagtgccacgcgctgcgactccgtccggagtagagctgagctcatagccatctcaacctcacgggtccaaagcatcaagctttcaccctccttgccttcgaaggtcttcacgctcaacatgagcggcttgggtcttgttcccgcgtcggacgacgaaggggggcgcttggggcgccgcggcagccgccatcctctgctggaggtgctctagaagagcattctcgtagcttgaaaacgcctcgagacgcgcgttcaccgcgtcggggccttgctgcgcaagttgcgtcacgccctccgggcccagcaaggacataagctttttaagcgcatcctgctggttcgggggcaagtgagcgaactgcttcattctccacagagggtcagtctatacagactcaggtgtcggattgactacaagtgctaccaagtgcagcggggctgccgtagctttagcgtcagaggaagacgcaacagactcacagagtctcggcttaagatagctcgttctaatgccagaacgtacgagtccgtacaagattcagcccgtaactcttaactgtgtgaatctcaaactgaatatatttctctttagcgcggccaagccgcctacggtgtaaatgtatcccgttcactatctagcatagtgaaccctagtcatatgcataatcagtggctctaaagccgtgtgcagattctcctactgatttcagttacacagtgtgtacccacttcgtaacccttcgggtaactctcgtgtaaccccgttacatgtttggtgttccgacacgtctatagctacgaacacggcaccgagtgggcggcaggacgtggtagcccgggccaatgcgctcgggacggcgtcaatagtgcgtagcgacgagatacactcggcatgatcggaggtctcgttcgatgcgggatggcgtcggagcggggatcggattggccacgtaggtagaggaggggacggcggcggtgtgcgggcagcgtgtgtgggcacgggaagcgttgtgttgtgcatgcgagggcgcaaaattttggggcaggcgggtaggtttgacttttggcgcctcgatagctcagttgggagagcgtcagactgaagatctgaaggtccctggttcgatcccgggtcgcggcacttttgcgtccttttgctgtgctcgccgcactcgtttctgcggctctgcggtgtctggcacgctgcctaccatggcgtgcccatcgtgctcgctgctgccgcgctgtttctcacccacgacgactcctactgaccggctgcagtcggtgtggctggccccgggctcaagcgagctgcgggtcaatttcgaccagcgctgtttggtgttccgacacgtctatagctacgaacacggcaccgagtgggcggcaggacgtggtagcccgggccaatgcgctcgggacggcgtcaatagtgcgtagcgacgagatacactcggcatgatcggaggtctcgttcgatgcgggatggcgtcggagcggggatcggattggccacgtaggtagaggaggggacggcggcggtgtgcgggcagcgtgtgtgggcacgggaagcgttgtgttgtgcatgcgagggcgcaaaattttggggcaggcgggtaggtttgacttttggcgcctcgatagctcagttgggagagcgtcactgaagatctgaaggtccctggttcgatcccgggtcgcggcacttttgcgtccttttgctgtgctcgccgcactcgtttctgcggctctgcggtgtctggcacgctgcctaccatggcgtgcccatcgtgcttgctgctgccgcgctgtttctcacccgcgacgattcctactgaccggctgcagtcggtgtggctggccccgggctcaagcgagctgcgggtcaatttcgaccagcgctgtttggtgttccgacacgtctatagctacgaacacggcaccgagtgggcggcaggacgtggtagcccgggccaatgcgctcgggacggcgtcaatagtgcgtagcgacgagatacactcggcatgatcggaggtctcgttcgatgcgggatggcgtcggagcggggatcggattggccacgtaggtagaggaggggacggcggcggtgtgcgggcagcgtgtgtgggcacgggaagcgttgtgttgtgcatgcgagggcgcaaaattttggggcaggcgggtaggtttgacttttggcgcctcgatagctcagttgggagagcgtcactgaagatctgaaggtccctggttcgatcccgggtcgcggcacttttgcgtccttttgctgtgctcgccgcactcgtttctgcggctctgcggtgtctggcacgctgcctaccatggcgtgcccatcgtgctcgctgctgccgcgctgtttctcacccgcgacgattcctactgaccggctgcagtcggtgtggctggccccgggctcaagcgagctgtgggtcaatttcgaccagcgctgtttggtgttccgacacgtgtatagctacgaacacggcaccgagtgggcggcaggacgtggtagcccgggccaatgcgctcgggacggcgtcaatagtgcgtagcgacgagatacactcggcatgatcggaggtctcgttcgatgcgggatggcgtcggagcggggatcggattggccacgtaggtagaggaggggacggcggcggtgtgcgggcagcgtgtgtgggcacgggaagcgttgtgttgtgcatgcgagggcgcaaaattttggggcaggcgggtaggtttgacttttggcgcctcgatagctcagttgggagagcgtcactgaagatctgaaggtccctgtttcgatcccgggtcgcggcacttttgcgtccttttgctgtgctcgccgcactcgtttctgcggctctgcggtgtctggcacgctgcctaccatggcgtgcccatcgtgctcgctgctgccgcgctgtttctcacccgcgacgactcctactgaccggctgcagtcggtgtggctggccccgggctcaagcgagctgtgggtcaatttcgaccagcgctgtttggtgttccgacacgtgtatagctacgaacacggcaccgagtgggcggcaggacgtggtagcccgggccaatgcgctcgggacggcgtcaatagtgcgtagcgacgagatacactcggcatgatcggaggtctcgttcgatgcgggatggcgtcggagcggggatcggattggccacgtaggtagaggaggggacggcggcggtgtgcgggcagcgtgtgtgggcacgggaagcgttgtgttgtgcatgcgagggcgcaaaatttgggggcaggcgggtaggtttgacttttggcgcctcgatagctcagttgggagagcgtcattgaagatctgaaggtccctggttcgatcccgggtcgcggcacttttgcgtccttttgctgtgctcgccgcactcgtttctgcggctctgcgggtctgacacgctgcctaccatggcgtgcccatcgtgctcgctgctgtcgcgctgtttctcacccgtgacgactcctactgaccggctgcagtcggtgtggctggccccgggctcaagcgagctgcgggtcaatttcgaccagcgctgtttggtgttccgacacgtctatagctacgaacacggcaccgagtgggcggcaggacgtggtagcccgggccaatgcgctcgggacggcgtcaatagtgcgtagcgacgagatacactcggcatgatcggaggtctcgttcgatgcgggatggcgtcggagcggggatcggattggccacgtaggtagaggaggggacggcggcggtgtgcgggcagcgtgtgtgggcacgggaagcgttgtgttgtgcatgcgagggcgcaaaattttggggcaggcgggtaggtttgacttttggcgcctcgatagctcagttgggagagcgtcagactgaagatctgaaggtccctggttcgatcccgggtcgcggcacttttgcgtccttttgctgtgctcgccgcactcgtttctgcggctctgcgggtctggcacgctgcctaccatggcgtgcccatcgtgctcgctgctgccgcgctgtttctcacccgcgacgactcctactgaccggctgcagtcggtgtcgctggccccgggctcaagcgagctgtgggtcaatttcgaccagcgctgtttggtgttccgacacgtctatagctacgaacacggcaccgagtgggcggcaggacgtggtagcccgggccaatgcgctcgggacggcgtcaatagtgcgtagcgacgagatacactcggcatgatcggaggtctcgttcgatgcgggatggcgtcggagcggggatcggattggccacgtaggtagaggaggggacggcggcggtgtgcgggcagcgtgtgtgggcacgggaagcgttgtgttgtgcatgcgagggcgcaaaatttgggggcaggcgggtaggtttgacttttggcgcctcgatagctcagttgggagagcgtcagactgaagatctgaaggtccctggttcgatcccgggtcgcggcacttttgcgtccttttgctgtgctcgccgcactcgtttctgcggctctgcgggtctggcacgctgcctaccatggcgtgcccatcgtgctcgctgctgccgcgctgtttctcacccgcgacgattcctactgaccggctgcagtcggtgtggctggccccgggctcaagcgagctgcgggtcaatttcgaccagcgctgtttggtgttccgacacgtgtatagctacgaacacggcaccgagtgggcggcaggacgtggtagcccgggccaatgcgctcgggacggcgtcaatagtgcgtagcgacgagatacactcggcatgatcggaggtctcgttcgatgcgggatggcgtcggagcggggatcggattggccacgtaggtagaggaggggacggcggcggtgtgcgggcagcgtgtgtgggcacgggaagcgttgtgttgtgcatgcgagggcgcaaaatttgggggcaggcgggtaggtttgacttttggcgcctcgatagctcagttgggagagcgtcagactgaagatctgaaggtccctggttcgatcccgggtcgcggcacttttgcgtccttttgctgtgctcgccgcactcgtttctgcggctctgcggtgtctggcacgctgcctaccatggcgtgctcatcgtgctcgctgctgccgcgctgtttctcacccgcgacgactcctactgaccggctgcagtcggtgtggctggccccgggctcaagcgagctgcgggtcaatttcgaccagcgctgtttggtgttccgacacgtctatagctacgaacacggcaccgagtgggcggcaggacgtggtagcccgggccaatgcgctcgggacggcgtcaatagtgcgtagcgacgagatacactcggcatgatcggaggtctcgttcgatgcgggatggcgtcggagcggggatcggattggccacgtaggtagaggaggggacggcggcggtgtgcgggcagcgtgtgtgggcacgggaagcgttgtgttgtgcatgcgagggcgcaaaatttgggggcaggcgggtaggtttgacttttggcgcctcgatagctcagttgggagagcgtcagactgaagatctgaaggtccctggttcgatcccgggtcgcggcacttttgcgtccttttgctgtgctcgccgcactcgtttctgcggctctgcggtgtctggcacgctgcctaccatggcgtgctcatcgtgctcgctgctgccgcgctgtttctcacccgcgacgactcctactgaccggctgcagtcggtgtggctggccccgggctcaagcgagctgcgggtcaatttcgaccagcgctgtttggtgttccgacacgtctatagctacgaacacggcaccgagtgggcggcaggacgtggtagcccgggccaatgcgctcgggacggcgtcaatagtgcgtagcgacgagatacactcggcatgatcggaggtctcgttcgatgcgggatggcgtcggagcggggatcggattggccacgtaggtagaggaggggacggcggcggtgtgcgggcagcgtgtgtgggcacgggaagcgttgtgttgtgcatgcgagggcgcaaaatttgggggcaggcgggtaggtttgacttttggcgcctcgatagctcagttgggagagcgtcagactgaagatctgaaggtccctggttcgatcccgggtcgcggcacttttgcgtccttttgctgtgctcgccgcactcgtttctgcggctctgcggtgtctggcacgctgcctaccatggcgtgcccatcgtgctcgctgctgccgcgctgtttctcacccgcgacgactcctactgaccggctgcagtcggtgtggctggccccgggctcaagcgagctgtgggtcaatttcgaccagcgctgtttggtgttccgacacgtgtatagctacgaacacggcaccgagtgggcggcaggacgtggtagcccgggccaatgcgctcgggacggcgtcaatagtgcgtagcgacgagatacactcggcatgatcggaggtctcgttcgatgcgggatggcgtcggagcggggatcggattggccacgtaggtagaggaggggacggcggcggtgtgcgggcagcgtgtgtgggcacgggaagcgttgtgttgtgcatgcgagggcgcaaaatttgggggcaggcgggtaggtttgacttttggcgcctcgatagctcagttgggagagcgtcactgaagatctgaaggtccctggttcgatcccgggtcgcggcacttttgcgtccttttgctgtgctcgccgcactcgtttctgcggctctgcggtgtctggcacgctgcctaccatggcgtgcccatcgtgctcgctgctgccgcgctgtttctcacccgcgacgactcctactgaccggctgcagtcggtgtggctggccccgggctcaagcgagctgtgggtcaatttcgaccagcgctgtttggtgttccgacacgtgtatagctacgaacacggcaccgagtgggcggcaggacgtggtagcccgggccaatgcgctcgggacggcgtcaatagtgcgtagcgacgagatacactcggcatgatcggaggtctcgttcgatgcgggatggcgtcggagcggggatcggattggccacgtaggtagaggaggggacggcggcggtgtgcgggcagcgtgtgtgggcacgggaagcgttgtgttgtgcatgcgagggcgcaaaattttggggcaggcgggtaggtttgacttttggcgcctcgatagctcagttgggagagcgtcagactgaagatctgaaggtccctggttcgatcccgggtcgcggcacttttgcgtccttttgctgtgctcgccgcactcgtttctgcggctctgcggtgtctggcacgctgcctaccatggcgtgcccatcgtgctcgctgctgccgcgctgtttctcacccgcgacgactcctactgaccggctgcagtcggtgtggctggccccgggctcaagcgagctgtgggtcaatttcgaccagcgctgtttggtgttccgacacgtgtatagctacgaacacggcaccgagtgggcggcaggacgtggtagcccgggccaatgcgctcgggacggcgtcaatagtgcgtagcgacgagatacactccgcatgatcggaggtctcgttcgatgcgggatggcgtcggagcggggatcggattggccacgtaggtagaggaggggacggcggcggtgtgcgggcagcgtgtgtgggcacgggaagcgttgtgttgtgcatgcgagggcgcaaaattttggggcaggcgggtaggtttgacttttggcgcctcgatagctcagttgggagagcgtcactgaagatctgaaggtccctggttcgatcccgggtcgcggcacttttgcgtccttttgctgtgctcgccgcactcgtttctgcggctctgcggtgtctggcacgctgcctaccatggcgtgcccatcgtgctcgctgctgccgcgctgtttctcacccgcgacgattcctactgaccggctgcagtcggtgtggctggccccgggctcaagcaagctgtgggtcaatttcgaccagcgctgtttggtgttccgacacgtgtatagctacgaacacggcaccgagtgggcggcaggacgtggtagcccgggccaatgcgctcgggacggcgtcaatagtgcgtagcgacgagatacactcggcatgatcggaggtctcgttcgatgcgggatggcgtcggagcggggatcggattggccacgtaggtagaggaggggacggcggcggtgtgcgggcagcgtgtgtgggcacgggaagcgttgtgttgtgcatgcgagggcgcaaaattttggggcaggcgggtaggtttgacttttggcgcctcgatagctcagttgggagagcgtcactgaagatctgaaggtccctggttcgatcccgggtcgcggcacttttgcgtccttttgctgtgctcgccgcactcgtttctgcgcctctgcggtgtctggcacgctgcctaccatggcgtgcccatcgtgctcgctgctgccgcgctgtttctcacccgcgacgactcctactgaccggctgcagtcggtgtggctggccccgggctcaagcgagctgtgggtcaatttcgaccagcgctgtttggtgttccgacacgtgtatagctacgaacacggcaccgagtgggcggcaggacgtggtagcccgggccaatgcgctcgggacggcgtcaatagtgcgtagcgacgagatacactcggcatgatcggaggtctcgttcgatgcgggatggcgtcggagcggggatcggattggccacgtaggtagaggaggggacggcggcggtgtgcgggcagcgtgtgtgggcacgggaagcgttgtgttgtgcatgcgagggcgcaaaattttggggcaggcgggtaggtttgacttttggcgcctcgatagctcagttgggagagcgtcactgaagatctgaaggtccctggttcgatcccgggtcgcggcacttttgcgtccttttgctgtgctcgccgcactcgtttctgcgcctctgcggtgtctggcatgctgcctaccatggcgtgcccatcgtgctcgctgctgccgcgctgtttctcacccgcgacgactcctactgaccggctgcagtcggtgtggctggccccgggctcaagcgagctgtgggtcaatttcgaccagcgctgtttggtgttccgacannnnnnnnnnnnnnnnnnnnnnnnnnnnnnnnnnnnnnnnnnnnnnnnnnnnnnnnnnnnnnnnnnnnnnnnnnnnnnnnnnnnnnnnnnnnnnnnnnnnnnnnnnnnnnnnnnnnnnnnnnnnnnnnnnnnnnnnnnnnnnnnnnnnnnnnnnnnnnnnnnnnnnnnnnnnnnnnnnnnnnnnnnnnnnnnnnnnnnnnnnnnnnnnnnnnnnnnnnnnnnnnnnnnnnnnnnnnnnnnnnnnnnnnnnnnnnnnnnnnnnnnnnnnnnnnnnnnnnnnnnnnnnnnnnnnnnnnnnnnnnnnnnnnnnnnnnnnnnnnnnnnnnnnnnnnnnnnnnnnnnnnnnnnnnnnnnnnnnnnnnnnnnnnnnnnnnnnnnnnnnnnnnnnnnnnnnnnnnnnnnnnnnnnnnnnnnnnnnnnnnnnnnnnnnnnnnnnnnnnnnnnnnnnnnnnnnnnnnnnnnnnnnnnnnnnnnnnnnnnnnnnnnnnnnnnnnnnnnnnnnnnnnnnnnnnnnnnnnnnnnnnnnnnnnnnnnnnnnnnnnnnnnnnnnnnnnnnnnnnnnnnnnnnnnnnnnnnnnnnnnnnnnnnnnnnnnnnnnnnnnnnnnnnnnnnnnnnnnnnnnnnnnnnnnnnnnnnnnnnnnnnnnnnnnnnnnnnnnnnnnnnnnnnnnnnnnnnnnnnnnnnnnnnnnnnnnnnnnnnnnnnnnnnnnnnnnnnnnnnnnnnnnnnnnnnnnnnnnnnnnnnnnnnnnnnnnnnnnnnnnnnnnnnnnnnnnnnnnnnnnnnnnnnnnnnnnnnnnnnnnnnnnnnnnnnnnnnnnnnnnnnnnnnnnnnnnnnnnnnnnnnnnnnnnnnnnnnnnnnnnnnnnnnnnnnnnnnnnnnnnnnnnnnnnnnnnnnnnnnnnnnnnnnnnnnnnnnnnnnnnnnnnnnnnnnnnnnnnnnnnnnnnnnnnnnnnnnnnnnnnnnnnnnnnnnnnnnnnnnnnnnnnnnnnnnnnnnnnnnnnnnnnnnnnnnnnnnnnnnnnnnnnnnnnnnnnnnnnnnnnnnnnnnnnnnnnnnnnnnnnnnnnnnnnnnnnnnnnnnnnnnnnnnnnnnnnnnnnnnnnnnnnnnnnnnnnnnnnnnnnnnnnnnnnnnnnnnnnnnnnnnnnnnnnnnnnnnnnnnnnnnnnnnnnnnnnnnnnnnnnnnnnnnnnnnnnnnnnnnnnnnnnnnnnnnnnnnnnnnnnnnnnnnnnnnnnnnnnnnnnnnnnnnnnnnnnnnnnnnnnnnnnnnnnnnnnnnnnnnnnnnnnnnnnnnnnnnnnnnnnnnnnnnnnnnnnnnnnnnnnnnnnnnnnnnnnnnnnnnnnnnnnnnnnnnnnnnnnnnnnnnnnnnnnnnnnnnnnnnnnnnnnnnnnnnnnnnnnnnnnnnnnnnnnnnnnnnnnnnnnnnnnnnnnnnnnnnnnnnnnnnnnnnnnnnnnnnnnnnnnnnnnnnnnnnnnnnnnnnnnnnnnnnnnnnnnnnnnnnnnnnnnnnnnnnnnnnnnnnnnnnnnnnnnnnnnnnnnnnnnnnnnnnnnnnnnnnnnnnnnnnnnnnnnnnnnnnnnnnnnnnnnnnnnnnnnnnnnnnnnnnnnnnnnnnnnnnnnnnnnnnnnnnnnnnnnnnnnnnnnnnnnnnnnnnnnnnnnnnnnnnnnnnnnnnnnnnnnnnnnnnnnnnnnnnnnnnnnnnnnnnnnnnnnnnnnnnnnnnnnnnnnnnnnnnnnnnnnnnnnnnnnnnnnnnnnnnnnnnnnnnnnnnnnnnnnnnnnnnnnnnnnnnnnnnnnnnnnnnnnnnnnnnnnnnnnnnnnnnnnnnnnnnnnnnnnnnnnnnnnnnnnnnnnnnnnnnnnnnnnnnnnnnnnnnnnnnnnnnnnnnnnnnnnnnnnnnnnnnnnnnnnnnnnnnnnnnnnnnnnnnnnnnnnnnnnnnnnnnnnnnnnnnnnnnnnnnnnnnnnnnnnnnnnnnnnnnnnnnnnnnnnnnnnnnnnnnnnnnnnnnnnnnnnnnnnnnnnnnnnnnnnnnnnnnnnnnnnnnnnnnnnnnnnnnnnnnnnnnnnnnnnnnnnnnnnnnnnnnnnnnnnnnnnnnnnnnnnnnnnnnnnnnnnnnnnnnnnnnnnnnnnnnnnnnnnnnnnnnnnnnnnnnnnnnnnnnnnnnnnnnnnnnnnnnnnnnnnnnnnnnnnnnnnnnnnnnnnnnnnnnnnnnnnnnnnnnnnnnnnnnnnnnnnnnnnnnnnnnnnnnnnnnnnnnnnnnnnnnnnnnnnnnnnnnnnnnnnnnnnnnnnnnnnnnnnnnnnnnnnnnnnnnnnnnnnnnnnnnnnnnnnnnnnnnnnnnnnnnnnnnnnnnnnnnnnnnnnnnnnnnnnnnnnnnnnnnnnnnnnnnnnnnnnnnnnnnnnnnnnnnnnnnnnnnnnnnnnnnnnnnnnnnnnnnnnnnnnnnnnnnnnnnnnnnnnnnnnnnnnnnnnnnnnnnnnnnnnnnnnnnnnnnnnnnnnnnnnnnnnnnnnnnnnnnnnnnnnnnnnnnnnnnnnnnnnnnnnnnnnnnnnnnnnnnnnnnnnnnnnnnnnnnnnnnnnnnnnnnnnnnnnnnnnnnnnnnnnnnnnnnnnnnnnnnnnnnnnnnnnnnnnnnnnnnnnnnnnnnnnnnnnnnnnnnnnnnnnnnnnnnnnnnnnnnnnnnnnnnnnnnnnnnnnnnnnnnnnnnnnnnnnnnnnnnnnnnnnnnnnnnnnnnnnnnnnnnnnnnnnnnnnnnnnnnnnnnnnnnnnnnnnnnnnnnnnnnnnnnnnnnnnnnnnnnnnnnnnnnnnnnnnnnnnnnnnnnnnnnnnnnnnnnnnnnnnnnnnnnnnnnnnnnnnnnnnnnnnnnnnnnnnnnnnnnnnnnnnnnnnnnnnnnnnnnnnnnnnnnnnnnnnnnnnnnnnnnnnnnnnnnnnnnnnnnnnnnnnnnnnnnnnnnnnnnnnnnnnnnnnnnnnnnnnnnnnnnnnnnnnnnnnnnnnnnnnnnnnnnnnnnnnnnnnnnnnnnnnnnnnnnnnnnnnnnnnnnnnnnnnnnnnnnnnnnnnnnnnnnnnnnnnnnnnnnnnnnnnnnnnnnnnnnnnnnnnnnnnnnnnnnnnnnnnnnnnnnnnnnnnnnnnnnnnnnnnnnnnnnnnnnnnnnnnnnnnnnnnnnnnnnnnnnnnnnnnnnnnnnnnnnnnnnnnnnnnnnnnnnnnnnnnnnnnnnnnnnnnnnnnnnnnnnnnnnnnnnnnnnnnnnnnnnnnnnnnnnnnnnnnnnnnnnnnnnnnnnnnnnnnnnnnnnnnnnnnnnnnnnnnnnnnnnnnnnnnnnnnnnnnnnnnnnnnnnnnnnnnnnnnnnnnnnnnnnnnnnnnnnnnnnnnnnnnnnnnnnnnnnnnnnnnnnnnnnnnnnnnnnnnnnnnnnnnnnnnnnnnnnnnnnnnnnnnnnnnnnnnnnnnnnnnnnnnnnnnnnnnnnnnnnnnnnnnnnnnnnnnnnnnnnnnnnnnnnnnnnnnnnnnnnnnnnnnnnnnnnnnnnnnnnnnnnnnnnnnnnnnnnnnnnnnnnnnnnnnnnnnnnnnnnnnnnnnnnnnnnnnnnnnnnnnnnnnnnnnnnnnnnnnnnnnnnnnnnnnnnnnnnnnnnnnnnnnnnnnnnnnnnnnnnnnnnnnnnnnnnnnnnnnnnnnnnnnnnnnnnnnnnnnnnnnnnnnnnnnnnnnnnnnnnnnnnnnnnnnnnnnnnnnnnnnnnnnnnnnnnnnnnnnnnnnnnnnnnnnnnnnnnnnnnnnnnnnnnnnnnnnnnnnnnnnnnnnnnnnnnnnnnnnnnnnnnnnnnnnnnnnnnnnnnnnnnnnnnnnnnnnnnnnnnnnnnnnnnnnnnnnnnnnnnnnnnnnnnnnnnnnnnnnnnnnnnnnnnnnnnnnnnnnnnnnnnnnnnnnnnnnnnnnnnnnnnnnnnnnnnnnnnnnnnnnnnnnnnnnnnnnnnnnnnnnnnnnnnnnnnnnnnnnnnnnnnnnnnnnnnnnnnnnnnnnnnnnnnnnnnnnnnnnnnnnnnnnnnnnnnnnnnnnnnnnnnnnnnnnnnnnnnnnnnnnnnnnnnnnnnnnnnnnnnnnnnnnnnnnnnnnnnnnnnnnnnnnnnnnnnnnnnnnnnnnnnnnnnnnnnnnnnnnnnnnnnnnnnnnnnnnnnnnnnnnnnnnnnnnnnnnnnnnnnnnnnnnnnnnnnnnnnnnnnnnnnnnnnnnnnnnnnnnnnnnnnnnnnnnnnnnnnnnnnnnnnnnnnnnnnnnnnnnnnnnnnnnnnnnnnnnnnnnnnnnnnnnnnnnnnnnnnnnnnnnnnnnnnnnnnnnnnnnnnnnnnnnnnnnnnnnnnnnnnnnnnnnnnnnnnnnnnnnnnnnnnnnnnnnnnnnnnnnnnnnnnnnnnnnnnnnnnnnnnnnnnnnnnnnnnnnnnnnnnnnnnnnnnnnnnnnnnnnnnnnnnnnnnnnnnnnnnnnnnnnnnnnnnnnnnnnnnnnnnnnnnnnnnnnnnnnnnnnnnnnnnnnnnnnnnnnnnnnnnnnnnnnnnnnnnnnnnnnnnnnnnnnnnnnnnnnnnnnnnnnnnnnnnnnnnnnnnnnnnnnnnnnnnnnnnnnnnnnnnnnnnnnnnnnnnnnnnnnnnnnnnnnnnnnnnnnnnnnnnnnnnnnnnnnnnnnnnnnnnnnnnnnnnnnnnnnnnnnnnnnnnnnnnnnnnnnnnnnnnnnnnnnnnnnnnnnnnnnnnnnnnnnnnnnnnnnnnnnnnnnnnnnnnnnnnnnnnnnnnnnnnnnnnnnnnnnnnnnnnnnnnnnnnnnnnnnnnnnnnnnnnnnnnnnnnnnnnnnnnnnnnnnnnnnnnnnnnnnnnnnnnnnnnnnnnnnnnnnnnnnnnnnnnnnnnnnnnnnnnnnnnnnnnnnnnnnnnnnnnnnnnnnnnnnnnnnnnnnnnnnnnnnnnnnnnnnnnnnnnnnnnnnnnnnnnnnnnnnnnnnnnnnnnnnnnnnnnnnnnnnnnnnnnnnnnnnnnnnnnnnnnnnnnnnnnnnnnnnnnnnnnnnnnnnnnnnnnnnnnnnnnnnnnnnnnnnnnnnnnnnnnnnnnnnnnnnnnnnnnnnnnnnnnnnnnnnnnnnnnnnnnnnnnnnnnnnnnnnnnnnnnnnnnnnnnnnnnnnnnnnnnnnnnnnnnnnnnnnnnnnnnnnnnnnnnnnnnnnnnnnnnnnnnnnnnnnnnnnnnnnnnnnnnnnnnnnnnnnnnnnnnnnnnnnnnnnnnnnnnnnnnnnnnnnnnnnnnnnnnnnnnnnnnnnnnnnnnnnnnnnnnnnnnnnnnnnnnnnnnnnnnnnnnnnnnnnnnnnnnnnnnnnnnnnnnnnnnnnnnnnnnnnnnnnnnnnnnnnnnnnnnnnnnnnnnnnnnnnnnnnnnnnnnnnnnnnnnnnnnnnnnnnnnnnnnnnnnnnnnnnnnnnnnnnnnnnnnnnnnnnnnnnnnnnnnnnnnnnnnnnnnnnnnnnnnnnnnnnnnnnnnnnnnnnnnnnnnnnnnnnnnnnnnnnnnnnnnnnnnnnnnnnnnnnnnnnnnnnnnnnnnnnnnnnnnnnnnnnnnnnnnnnnnnnnnnnnnnnnnnnnnnnnnnnnnnnnnnnnnnnnnnnnnnnnnnnnnnnnnnnnnnnnnnnnnnnnnnnnnnnnnnnnnnnnnnnnnnnnnnnnnnnnnnnnnnnnnnnnnnnnnnnnnnnnnnnnnnnnnnnnnnnnnnnnnnnnnnnnnnnnnnnnnnnnnnnnnnnnnnnnnnnnnnnnnnnnnnnnnnnnnnnnnnnnnnnnnnnnnnnnnnnnnnnnnnnnnnnnnnnnnnnnnnnnnnnnnnnnnnnnnnnnnnnnnnnnnnnnnnnnnnnnnnnnnnnnnnnnnnnnnnnnnnnnnnnnnnnnnnnnnnnnnnnnnnnnnnnnnnnnnnnnnnnnnnnnnnnnnnnnnnnnnnnnnnnnnnnnnnnnnnnnnnnnnnnnnnnnnnnnnnnnnnnnnnnnnnnnnnnnnnnnnnnnnnnnnnnnnnnnnnnnnnnnnnnnnnnnnnnnnnnnnnnnnnnnnnnnnnnnnnnnnnnnnnnnnnnnnnnnnnnnnnnnnnnnnnnnnnnnnnnnnnnnnnnnnnnnnnnnnnnnnnnnnnnnnnnnnnnnnnnnnnnnnnnnnnnnnnnnnnnnnnnnnnnnnnnnnnnnnnnnnnnnnnnnnnnnnnnnnnnnnnnnnnnnnnnnnnnnnnnnnnnnnnnnnnnnnnnnnnnnnnnnnnnnnnnnnnnnnnnnnnnnnnnnnnnnnnnnnnnnnnnnnnnnnnnnnnnnnnnnnnnnnnnnnnnnnnnnnnnnnnnnnnnnnnnnnnnnnnnnnnnnnnnnnnnnnnnnnnnnnnnnnnnnnnnnnnnnnnnnnnnnnnnnnnnnnnnnnnnnnnnnnnnnnnnnnnnnnnnnnnnnnnnnnnnnnnnnnnnnnnnnnnnnnnnnnnnnnnnnnnnnnnnnnnnnnnnnnnnnnnnnnnnnnnnnnnnnnnnnnnnnnnnnnnnnnnnnnnnnnnnnnnnnnnnnnnnnnnnnnnnnnnnnnnnnnnnnnnnnnnnnnnnnnnnnnnnnnnnnnnnnnnnnnnnnnnnnnnnnnnnnnnnnnnnnnnnnnnnnnnnnnnnnnnnnnnnnnnnnnnnnnnnnnnnnnnnnnnnnnnnnnnnnnnnnnnnnnnnnnnnnnnnnnnnnnnnnnnnnnnnnnnnnnnnnnnnnnnnnnnnnnnnnnnnnnnnnnnnnnnnnnnnnnnnnnnnnnnnnnnnnnnnnnnnnnnnnnnnnnnnnnnnnnnnnnnnnnnnnnnnnnnnnnnnnnnnnnnnnnnnnnnnnnnnnnnnnnnnnnnnnnnnnnnnnnnnnnnnnnnnnnnnnnnnnnnnnnnnnnnnnnnnnnnnnnnnnnnnnnnnnnnnnnnnnnnnnnnnnnnnnnnnnnnnnnnnnnnnnnnnnnnnnnnnnnnnnnnnnnnnnnnnnnnnnnnnnnnnnnnnnnnnnnnnnnnnnnnnnnnnnnnnnnnnnnnnnnnnnnnnnnnnnnnnnnnnnnnnnnnnnnnnnnnnnnnnnnnnnnnnnnnnnnnnnnnnnnnnnnnnnnnnnnnnnnnnnnnnnnnnnnnnnnnnnnnnnnnnnnnnnnnnnnnnnnnnnnnnnnnnnnnnnnnnnnnnnnnnnnnnnnnnnnnnnnnnnnnnnnnnnnnnnnnnnnnnnnnnnnnnnnnnnnnnnnnnnnnnnnnnnnnnnnnnnnnnnnnnnnnnnnnnnnnnnnnnnnnnnnnnnnnnnnnnnnnnnnnnnnnnnnnnnnnnnnnnnnnnnnnnnnnnnnnnnnnnnnnnnnnnnnnnnnnnnnnnnnnnnnnnnnnnnnnnnnnnnnnnnnnnnnnnnnnnnnnnnnnnnnnnnnnnnnnnnnnnnnnnnnnnnnnnnnnnnnnnnnnnnnnnnnnnnnnnnnnnnnnnnnnnnnnnnnnnnnnnnnnnnnnnnnnnnnnnnnnnnnnnnnnnnnnnnnnnnnnnnnnnnnnnnnnnnnnnnnnnnnnnnnnnnnnnnnnnnnnnnnnnnnnnnnnnnnnnnnnnnnnnnnnnnnnnnnnnnnnnnnnnnnnnnnnnnnnnnnnnnnnnnnnnnnnnnnnnnnnnnnnnnnnnnnnnnnnnnnnnnnnnnnnnnnnnnnnnnnnnnnnnnnnnnnnnnnnnnnnnnnnnnnnnnnnnnnnnnnnnnnnnnnnnnnnnnnnnnnnnnnnnnnnnnnnnnnnnnnnnnnnnnnnnnnnnnnnnnnnnnnnnnnnnnnnnnnnnnnnnnnnnnnnnnnnnnnnnnnnnnnnnnnnnnnnnnnnnnnnnnnnnnnnnnnnnnnnnnnnnnnnnnnnnnnnnnnnnnnnnnnnnnnnnnnnnnnnnnnnnnnnnnnnnnnnnnnnnnnnnnnnnnnnnnnnnnnnnnnnnnnnnnnnnnnnnnnnnnnnnnnnnnnnnnnnnnnnnnnnnnnnnnnnnnnnnnnnnnnnnnnnnnnnnnnnnnnnnnnnnnnnnnnnnnnnnnnnnnnnnnnnnnnnnnnnnnnnnnnnnnnnnnnnnnnnnnnnnnnnnnnnnnnnnnnnnnnnnnnnnnnnnnnnnnnnnnnnnnnnnnnnnnnnnnnnnnnnnnnnnnnnnnnnnnnnnnnnnnnnnnnnnnnnnnnnnnnnnnnnnnnnnnnnnnnnnnnnnnnnnnnnnnnnnnnnnnnnnnnnnnnnnnnnnnnnnnnnnnnnnnnnnnnnnnnnnnnnnnnnnnnnnnnnnnnnnnnnnnnnnnnnnnnnnnnnnnnnnnnnnnnnnnnnnnnnnnnnnnnnnnnnnnnnnnnnnnnnnnnnnnnnnnnnnnnnnnnnnnnnnnnnnnnnnnnnnnnnnnnnnnnnnnnnnnnnnnnnnnnnnnnnnnnnnnnnnnnnnnnnnnnnnnnnnnnnnnnnnnnnnnnnnnnnnnnnnnnnnnnnnnnnnnnnnnnnnnnnnnnnnnnnnnnnnnnnnnnnnnnnnnnnnnnnnnnnnnnnnnnnnnnnnnnnnnnnnnnnnnnnnnnnnnnnnnnnnnnnnnnnnnnnnnnnnnnnnnnnnnnnnnnnnnnnnnnnnnnnnnnnnnnnnnnnnnnnnnnnnnnnnnnnnnnnnnnnnnnnnnnnnnnnnnnnnnnnnnnnnnnnnnnnnnnnnnnnnnnnnnnnnnnnnnnnnnnnnnnnnnnnnnnnnnnnnnnnnnnnnnnnnnnnnnnnnnnnnnnnnnnnnnnnnnnnnnnnnnnnnnnnnnnnnnnnnnnnnnnnnnnnnnnnnnnnnnnnnnnnnnnnnnnnnnnnnnnnnnnnnnnnnnnnnnnnnnnnnnnnnnnnnnnnnnnnnnnnnnnnnnnnnnnnnnnnnnnnnnnnnnnnnnnnnnnnnnnnnnnnnnnnnnnnnnnnnnnnnnnnnnnnnnnnnnnnnnnnnnnnnnnnnnnnnnnnnnnnnnnnnnnnnnnnnnnnnnnnnnnnnnnnnnnnnnnnnnnnnnnnnnnnnnnnnnnnnnnnnnnnnnnnnnnnnnnnnnnnnnnnnnnnnnnnnnnnnnnnnnnnnnnnnnnnnnnnnnnnnnnnnnnnnnnnnnnnnnnnnnnnnnnnnnnnnnnnnnnnnnnnnnnnnnnnnnnnnnnnnnnnnnnnnnnnnnnnnnnnnnnnnnnnnnnnnnnnnnnnnnnnnnnnnnnnnnnnnnnnnnnnnnnnnnnnnnnnnnnnnnnnnnnnnnnnnnnnnnnnnnnnnnnnnnnnnnnnnnnnnnnnnnnnnnnnnnnnnnnnnnnnnnnnnnnnnnnnnnnnnnnnnnnnnnnnnnnnnnnnnnnnnnnnnnnnnnnnnnnnnnnnnnnnnnnnnnnnnnnnnnnnnnnnnnnnnnnnnnnnnnnnnnnnnnnnnnnnnnnnnnnnnnnnnnnnnnnnnnnnnnnnnnnnnnnnnnnnnnnnnnnnnnnnnnnnnnnnnnnnnnnnnnnnnnnnnnnnnnnnnnnnnnnnnnnnnnnnnnnnnnnnnnnnnnnnnnnnnnnnnnnnnnnnnnnnnnnnnnnnnnnnnnnnnnnnnnnnnnnnnnnnnnnnnnnnnnnnnnnnnnnnnnnnnnnnnnnnnnnnnnnnnnnnnnnnnnnnnnnnnnnnnnnnnnnnnnnnnnnnnnnnnnnnnnnnnnnnnnnnnnnnnnnnnnnnnnnnnnnnnnnnnnnnnnnnnnnnnnnnnnnnnnnnnnnnnnnnnnnnnnnnnnnnnnnnnnnnnnnnnnnnnnnnnnnnnnnnnnnnnnnnnnnnnnnnnnnnnnnnnnnnnnnnnnnnnnnnnnnnnnnnnnnnnnnnnnnnnnnnnnnnnnnnnnnnnnnnnnnnnnnnnnnnnnnnnnnnnnnnnnnnnnnnnnnnnnnnnnnnnnnnnnnnnnnnnnnnnnnnnnnnnnnnnnnnnnnnnnnnnnnnnnnnnnnnnnnnnnnnnnnnnnnnnnnnnnnnnnnnnnnnnnnnnnnnnnnnnnnnnnnnnnnnnnnnnnnnnnnnnnnnnnnnnnnnnnnnnnnnnnnnnnnnnnnnnnnnnnnnnnnnnnnnnnnnnnnnnnnnnnnnnnnnnnnnnnnnnnnnnnnnnnnnnnnnnnnnnnnnnnnnnnnnnnnnnnnnnnnnnnnnnnnnnnnnnnnnnnnnnnnnnnnnnnnnnnnnnnnnnnnnnnnnnnnnnnnnnnnnnnnnnnnnnnnnnnnnnnnnnnnnnnnnnnnnnnnnnnnnnnnnnnnnnnnnnnnnnnnnnnnnnnnnnnnnnnnnnnnnnnnnnnnnnnnnnnnnnnnnnnnnnnnnnnnnnnnnnnnnnnnnnnnnnnnnnnnnnnnnnnnnnnnnnnnnnnnnnnnnnnnnnnnnnnnnnnnnnnnnnnnnnnnnnnnnnnnnnnnnnnnnnnnnnnnnnnnnnnnnnnnnnnnnnnnnnnnnnnnnnnnnnnnnnnnnnnnnnnnnnnnnnnnnnnnnnnnnnnnnnnnnnnnnnnnnnnnnnnnnnnnnnnnnnnnnnnnnnnnnnnnnnnnnnnnnnnnnnnnnnnnnnnnnnnnnnnnnnnnnnnnnnnnnnnnnnnnnnnnnnnnnnnnnnnnnnnnnnnnnnnnnnnnnnnnnnnnnnnnnnnnnnnnnnnnnnnnnnnnnnnnnnnnnnnnnnnnnnnnnnnnnnnnnnnnnnnnnnnnnnnnnnnnnnnnnnnnnnnnnnnnnnnnnnnnnnnnnnnnnnnnnnnnnnnnnnnnnnnnnnnnnnnnnnnnnnnnnnnnnnnnnnnnnnnnnnnnnnnnnnnnnnnnnnnnnnnnnnnnnnnnnnnnnnnnnnnnnnnnnnnnnnnnnnnnnnnnnnnnnnnnnnnnnnnnnnnnnnnnnnnnnnnnnnnnnnnnnnnnnnnnnnnnnnnnnnnnnnnnnnnnnnnnnnnnnnnnnnnnnnnnnnnnnnnnnnnnnnnnnnnnnnnnnnnnnnnnnnnnnnnnnnnnnnnnnnnnnnnnnnnnnnnnnnnnnnnnnnnnnnnnnnnnnnnnnnnnnnnnnnnnnnnnnnnnnnnnnnnnnnnnnnnnnnnnnnnnnnnnnnnnnnnnnnnnnnnnnnnnnnnnnnnnnnnnnnnnnnnnnnnnnnnnnnnnnnnnnnnnnnnnnnnnnnnnnnnnnnnnnnnnnnnnnnnnnnnnnnnnnnnnnnnnnnnnnnnnnnnnnnnnnnnnnnnnnnnnnnnnnnnnnnnnnnnnnnnnnnnnnnnnnnnnnnnnnnnnnnnnnnnnnnnnnnnnnnnnnnnnnnnnnnnnnnnnnnnnnnnnnnnnnnnnnnnnnnnnnnnnnnnnnnnnnnnnnnnnnnnnnnnnnnnnnnnnnnnnnnnnnnnnnnnnnnnnnnnnnnnnnnnnnnnnnnnnnnnnnnnnnnnnnnnnnnnnnnnnnnnnnnnnnnnnnnnnnnnnnnnnnnnnnnnnnnnnnnnnnnnnnnnnnnnnnnnnnnnnnnnnnnnnnnnnnnnnnnnnnnnnnnnnnnnnnnnnnnnnnnnnnnnnnnnnnnnnnnnnnnnnnnnnnnnnnnnnnnnnnnnnnnnnnnnnnnnnnnnnnnnnnnnnnnnnnnnnnnnnnnnnnnnnnnnnnnnnnnnnnnnnnnnnnnnnnnnnnnnnnnnnnnnnnnnnnnnnnnnnnnnnnnnnnnnnnnnnnnnnnnnnnnnnnnnnnnnnnnnnnnnnnnnnnnnnnnnnnnnnnnnnnnnnnnnnnnnnnnnnnnnnnnnnnnnnnnnnnnnnnnnnnnnnnnnnnnnnnnnnnnnnnnnnnnnnnnnnnnnnnnnnnnnnnnnnnnnnnnnnnnnnnnnnnnnnnnnnnnnnnnnnnnnnnnnnnnnnnnnnnnnnnnnnnnnnnnnnnnnnnnnnnnnnnnnnnnnnnnnnnnnnnnnnnnnnnnnnnnnnnnnnnnnnnnnnnnnnnnnnnnnnnnnnnnnnnnnnnnnnnnnnnnnnnnnnnnnnnnnnnnnnnnnnnnnnnnnnnnnnnnnnnnnnnnnnnnnnnnnnnnnnnnnnnnnnnnnnnnnnnnnnnnnnnnnnnnnnnnnnnnnnnnnnnnnnnnnnnnnnnnnnnnnnnnnnnnnnnnnnnnnnnnnnnnnnnnnnnnnnnnnnnnnnnnnnnnnnnnnnnnnnnnnnnnnnnnnnnnnnnnnnnnnnnnnnnnnnnnnnnnnnnnnnnnnnnnnnnnnnnnnnnnnnnnnnnnnnnnnnnnnnnnnnnnnnnnnnnnnnnnnnnnnnnnnnnnnnnnnnnnnnnnnnnnnnnnnnnnnnnnnnnnnnnnnnnnnnnnnnnnnnnnnnnnnnnnnnnnnnnnnnnnnnnnnnnnnnnnnnnnnnnnnnnnnnnnnnnnnnnnnnnnnnnnnnnnnnnnnnnnnnnnnnnnnnnnnnnnnnnnnnnnnnnnnnnnnnnnnnnnnnnnnnnnnnnnnnnnnnnnnnnnnnnnnnnnnnnnnnnnnnnnnnnnnnnnnnnnnnnnnnnnnnnnnnnnnnnnnnnnnnnnnnnnnnnnnnnnnnnnnnnnnnnnnnnnnnnnnnnnnnnnnnnnnnnnnnnnnnnnnnnnnnnnnnnnnnnnnnnnnnnnnnnnnnnnnnnnnnnnnnnnnnnnnnnnnnnnnnnnnnnnnnnnnnnnnnnnnnnnnnnnnnnnnnnnnnnnnnnnnnnnnnnnnnnnnnnnnnnnnnnnnnnnnnnnnnnnnnnnnnnnnnnnnnnnnnnnnnnnnnnnnnnnnnnnnnnnnnnnnnnnnnnnnnnnnnnnnnnnnnnnnnnnnnnnnnnnnnnnnnnnnnnnnnnnnnnnnnnnnnnnnnnnnnnnnnnnnnnnnnnnnnnnnnnnnnnnnnnnnnnnnnnnnnnnnnnnnnnnnnnnnnnnnnnnnnnnnnnnnnnnnnnnnnnnnnnnnnnnnnnggacggcgtcaatagtgcgtagcgacgagatacactcggcatgatcggaggtctcgttcgatgcgggatggcgtcggagcggggatcggattggccacgtaggtagaggaggggacggcggcggtgtgcgggcagcgtgtgtgggcacgggaagcgttgtgttgtgcatgcgagggcgcaaaattttggggcaggcgggtaggtttgatttttggcgcctcgatagctcagttgggagagcgtcattgaagatctgaaggtccctggttcgatcccgggtcgcggcacttttgcgtccttttgctgtgctcgccgcactcgtttctgcggctctgcggtgtctggcacgctgcctaccatggcgtgcccatcgtgctcgctgctgtcgcgctgtttctcacccgtgacgactcctactgaccggctgcagtcggtgtggctggccccgggctcaagcgagctgcgggtcaatttcgaccagcgctgtttggtgttccgacacgtctatagctacgaacacggcaccgagtgggcggcaggacgtggtagcccgggccaatgcgctcgggacggcgttaatagtgcgtagcgacgagatacactcggcatgatcggaggtctcgttcgatgcgggatggcgtcggagcggggatcggattggccacgtaggtagaggaggggacggcggcggtgtgcgggcagcgtgtgtgggcacgggaagcgttgtgttgtgcatgcgagggcgcaaaattttggggcaggcgggtaggtttgacttttggcgcctcgatagctcagttgggagagcgtcagactgaagatctgaaggtccctggttcgatcccgggtcgcggcacttttgcgtccttttgctgtgctcgccgcactcgtttctgcgactctgcgggtctgacacgctgcctaccatggcgtgcccatcgtgctcgctgctgtcgcgctgtttctcacccgtgacgactcctactgaccggctgcagtcggtgtggctggccccgggctcaagcgagctgcgggtcaatttcgaccagcgctgtttggtgttccgacacgtctatagctacgaacacggcaccgagtgggcggcaggacgtggtagcccgggccaatgcgctcgggacggcgtcaatagtgcgtagcgacgagatacactcggcatgatcggaggtctcgttcgatgcgggatggcgtcggagcggggatcggattggccacgtaggtagaggaggggacggcggcggtgtgcgggcagcgtgtgtgggcacgggaagcgttgtgttgtgcatgcgagggcgcaaaattttggggcaggcgggtaggtttgacttttggcgcctcgatagctcagttgggagagcgtcagactgaagatctgaaggtccctggttcgatcccgggtcgcggcacttttgcgtccttttgctgtgctcgccgcactcgtttctgcggctctgcgggtctgacacgctgcctaccatggcgtgcccatcgtgctcgctgctgtcgcgctgtttctcacccgcgacgattcctactgaccggctgcagtcggtgtggctggccccgggctcaagcgagctgcgggtcaatttcgaccagcgctgtttggtgttccgacacgtctatagctacgaacacggcaccgagtgggcggcaggacgtggtagcccgggccaatgcgctcgggacggcgtcaatagtgcgtagcgacgagatacactcggcatgatcggaggtctcgttcgatgcgggatggcgtcggagcggggatcggattggccacgtaggtagaggaggggacggcggcggtgtgcgggcagcgtgtgtgggcacgggaagcgttgtgttgtgcatgcgagggcgcaaaattttggggcaggcgggtaggtttgacttttggcgcctcgatagctcagttgggagagcgtcagactgaagatctgaaggtccctggttcgatcccgggtcgcggcacttttgcgtccttttgctgtgctcgccgcactcgtttctgcggctctgcgggtctgacacgctgcctaccatggcgtgcccatcgtgctcgctgctgtcgcgctgtttctcacccgcgacgattcctactgaccggctgcagtcggtgtggctggccccgggctcaagcgagctgcgggtcaatttcgaccagcgctgtttggtgttccgacacgtctatagctacgaacacggcaccgagtgggcggcaggacgtggtagcccgggccaatgcgctcgggacggcgtcaatagtgcgtagcgacgagatacactcggcatgatcggaggtctcgttcgatgcgggatggcgtcggagcggggatcggattggccacgtaggtagaggaggggacggcggcggtgtgcgggcagcgtgtgtgggcacgggaagcgttgtgttgtgcatgcgagggcgcaaaattttggggcaggcgggtaggtttgacttttggcgcctcgatagctcagttgggagagcgtcagactgaagatctgaaggtccctggttcgatcccgggtcgcggcacttttgcgtccttttgctgtgctcgccgcactcgtttctgcggctctgcgggtctgacacgctgcctaccatggcgtgcccatcgtgctcgctgctgtcgcgctatttctcacccgtgacgactcctactgaccggctgcagtcagtgtggctggccccgggctcaagcgagctgcgggtcaatttcgaccagcgctgtttggtgttccgacacgtgtatagctacgaacacggcaccgagtgggcggcaggacgtggtagcccgggccaatgcgctcgggacggcgtcaatagtgcgtagcgacgagatacactcggcatgatcggaggtctcgttcgatgcgggatggcgtcggagcggggatcggattggccacgtaggtagaggaggggacggcggcggtgtgcgggcagcgtgtgtgggcacgggaagcgttgtgttgtgcatgcgagggcgcaaaattttggggcaggcgggtaggtttgacttttggcgcctcgatagctcagttgggagagcgtcagactgaagatctgaaggtccctggttcgatcccgggtcgcggcacttttgcgtccttttgctgtgctcgccgcactcgtttctgcggctctgcggtgtctggcacgctgcctaccatggcgtgcccatcgtgctcgctgctgccgcgctgtttctcacccgcgacgactcctactgaccggctgcagtcggtgtggctggccccgggctcaagcgagctgcgggtcaatttcgaccagcgctgtttggtgttccgacacgtctatagctacgaacacggcaccgagtgggcggcaggacgtggtagcccgggccaatgcgctcgggacggcgtcaatagtgcgtagcgacgagatacactcggcatgatcggaggtctcgttcgatgcgggatggcgtcggagcggggatcggattggccacgtaggtagaggaggggacggcggcggtgtgcgggcagcgtgtgtgggcacgggaagcgttgtgttgtgcatgcgagggcgcaaaattttggggcaggcgggtaggtttgacttttggcgcctcgatagctcagttgggagagcgtcactgaagatctgaaggtccctggttcgatcccgggtcgcggcacttttgcgtccttttgctgtgctcgccgcactcgtttctgcggctctgcggtgtctggcacgctgcctaccatggcgtgcccatcgtgctcgctgctgccgcgctgtttctcacccgcgacgactcctactgaccggctgcagtcggtgtggctggccccgggctcaagcgagctgcgggtcaatttcgaccagcgctgtttggtgttccgacacgtgtatagctacgaacacggcaccgagtgggcggcaggacgtggtagcccgggccaatgcgctcgggacggcgtcaatagtgcgtagcgacgagatacactcggcatgatcggaggtctcgttcgatgcgggatggcgtcggagcggggatcggattggccacgtaggtagaggaggggacggcggcggtgtgcgggcagcgtgtgtgggcacgggaagcgttgtgttgtgcatgcgagggcgcaaaattttggggcaggcgggtaggtttgatttttggcgcctcgatagctcagttgggagagcgtcagactgaagatctgaaggtccctggttcgatcccgggtcgcggcacttttgcgtccttttgctgtgctcgccgcactcgtttctgcggctctgcgggtctgacacgctgcctaccatggcgtgcccatcgtgctcgctgctgccgcgctgtttctcacccgcgacgattcctactgaccggctgcagtcggtgtggctggccccgggctcaagcgagctgcgggtcaatttcgaccagcgctgtttggtgttccgacacgtctatagctacgaacacggcaccgagtgggcggcaggacgtggtagcccgggccaatgcgctcgggacggcgtcaatagtgcgtagcgacgagatacactcggcatgatcggaggtctcgttcgatgcgggatggcgtcggagcggggatcggattggccacgtaggtagaggaggggacggcggcggtgtgcgggcagcgtgtgtgggcacgggaagcgttgtgttgtgcatgcgagggcgcaaaattttggggcaggcgggtaggtttgatttttggcgcctcgatagctcagttgggagagcgtcagactgaagatctgaaggtccctggttcgatcccgggtcgcggcacttttgcgtccttttgctgtgctcgccgcactcgtttctgcggctctgcgggtctgacacgctgcctaccatggcgtgcccatcgtgctcgctgctgtcgcgctgtttctcacccgtgacgattcctactgaccggctgcagtcggtgtggctggcnnnnnnnnnnnnnnnnnnnnnnnnnnnnnnnnnnnnnnnnnnnnnnnnnnnnnnnnnnnnnnnnnnnnnnnnnnnnnnnnnnnnnnnnnnnnnnnnnnnnnnnnnnnnnnnnnnnnnnnnnnnnnnnnnnnnnnnnnnnnnnnnnnnnnnnnnnnnnnnnnnnnnnnnnnnnnnnnnnnnnnnnnnnnnnnnnnnnnnnnnnnnnnnnnnnnnnnnnnnnnnnnnnnnnnnnnnnnnnnnnnnnnnnnnnnnnnnnnnnnnnnnnnnnnnnnnnnnnnnnnnnnnnnnnnnnnnnnnnnnnnnnnnnnnnnnnnnnnnnnnnnnnnnnnnnnnnnnnnnnnnnnnnnnnnnnnnnnnnnnnnnnnnnnnnnnnnnnnnnnnnnnnnnnnnnnnnnnnnnnnnnnnnnnnnnnnnnnnnnnnnnnnnnnnnnnnnnnnnnnnnnnnnnnnnnnnnnnnnnnnnnnnnnnnnnnnnnnnnnnnnnnnnnnnnnnnnnnnnnnnnnnnnnnnnnnnnnnnnnnnnnnnnnnnnnnnnnnnnnnnnnnnnnnnnnnnnnnnnnnnnnnnnnnnnnnnnnnnnnnnnnnnnnnnnnnnnnnnnnnnnnnnnnnnnnnnnnnnnnnnnnnnnnnnnnnnnnnnnnnnnnnnnnnnnnnnnnnnnnnnnnnnnnnnnnnnnnnnnnnnnnnnnnnnnnnnnnnnnnnnnnnnnnnnnnnnnnnnnnnnnnnnnnnnnnnnnnnnnnnnnnnnnnnnnnnnnnnnnnnnnnnnnnnnnnnnnnnnnnnnnnnnnnnnnnnnnnnnnnnnnnnnnnnnnnnnnnnnnnnnnnnnnnnnnnnnnnnnnnnnnnnnnnnnnnnnnnnnnnnnnnnnnnnnnnnnnnnnnnnnnnnnnnnnnnnnnnnnnnnnnnnnnnnnnnnnnnnnnnnnnnnnnnnnnnnnnnnnnnnnnnnnnnnnnnnnnnnnnnnnnnnnnnnnnnnnnnnnnnnnnnnnnnnnnnnnnnnnnnnnnnnnnnnnnnnnnnnnnnnnnnnnnnnnnnnnnnnnnnnnnnnnnnnnnnnnnnnnnnnnnnnnnnnnnnnnnnnnnnnnnnnnnnnnnnnnnnnnnnnnnnnnnnnnnnnnnnnnnnnnnnnnnnnnnnnnnnnnnnnnnnnnnnnnnnnnnnnnnnnnnnnnnnnnnnnnnnnnnnnnnnnnnnnnnnnnnnnnnnnnnnnnnnnnnnnnnnnnnnnnnnnnnnnnnnnnnnnnnnnnnnnnnnnnnnnnnnnnnnnnnnnnnnnnnnnnnnnnnnnnnnnnnnnnnnnnnnnnnnnnnnnnnnnnnnnnnnnnnnnnnnnnnnnnnnnnnnnnnnnnnnnnnnnnnnnnnnnnnnnnnnnnnnnnnnnnnnnnnnnnnnnnnnnnnnnnnnnnnnnnnnnnnnnnnnnnnnnnnnnnnnnnnnnnnnnnnnnnnnnnnnnnnnnnnnnnnnnnnnnnnnnnnnnnnnnnnnnnnnnnnnnnnnnnnnnnnnnnnnnnnnnnnnnnnnnnnnnnnnnnnnnnnnnnnnnnnnnnnnnnnnnnnnnnnnnnnnnnnnnnnnnnnnnnnnnnnnnnnnnnnnnnnnnnnnnnnnnnnnnnnnnnnnnnnnnnnnnnnnnnnnnnnnnnnnnnnnnnnnnnnnnnnnnnnnnnnnnnnnnnnnnnnnnnnnnnnnnnnnnnnnnnnnnnnnnnnnnnnnnnnnnnnnnnnnnnnnnnnnnnnnnnnnnnnnnnnnnnnnnnnnnnnnnnnnnnnnnnnnnnnnnnnnnnnnnnnnnnnnnnnnnnnnnnnnnnnnnnnnnnnnnnnnnnnnnnnnnnnnnnnnnnnnnnnnnnnnnnnnnnnnnnnnnnnnnnnnnnnnnnnnnnnnnnnnnnnnnnnnnnnnnnnnnnnnnnnnnnnnnnnnnnnnnnnnnnnnnnnnnnnnnnnnnnnnnnnnnnnnnnnnnnnnnnnnnnnnnnnnnnnnnnnnnnnnnnnnnnnnnnnnnnnnnnnnnnnnnnnnnnnnnnnnnnnnnnnnnnnnnnnnnnnnnnnnnnnnnnnnnnnnnnnnnnnnnnnnnnnnnnnnnnnnnnnnnnnnnnnnnnnnnnnnnnnnnnnnnnnnnnnnnnnnnnnnnnnnnnnnnnnnnnnnnnnnnnnnnnnnnnnnnnnnnnnnnnnnnnnnnnnnnnnnnnnnnnnnnnnnnnnnnnnnnnnnnnnnnnnnnnnnnnnnnnnnnnnnnnnnnnnnnnnnnnnnnnnnnnnnnnnnnnnnnnnnnnnnnnnnnnnnnnnnnnnnnnnnnnnnnnnnnnnnnnnnnnnnnnnnnnnnnnnnnnnnnnnnnnnnnnnnnnnnnnnnnnnnnnnnnnnnnnnnnnnnnnnnnnnnnnnnnnnnnnnnnnnnnnnnnnnnnnnnnnnnnnnnnnnnnnnnnnnnnnnnnnnnnnnnnnnnnnnnnnnnnnnnnnnnnnnnnnnnnnnnnnnnnnnnnnnnnnnnnnnnnnnnnnnnnnnnnnnnnnnnnnnnnnnnnnnnnnnnnnnnnnnnnnnnnnnnnnnnnnnnnnnnnnnnnnnnnnnnnnnnnnnnnnnnnnnnnnnnnnnnnnnnnnnnnnnnnnnnnnnnnnnnnnnnnnnnnnnnnnnnnnnnnnnnnnnnnnnnnnnnnnnnnnnnnnnnnnnnnnnnnnnnnnnnnnnnnnnnnnnnnnnnnnnnnnnnnnnnnnnnnnnnnnnnnnnnnnnnnnnnnnnnnnnnnnnnnnnnnnnnnnnnnnnnnnnnnnnnnnnnnnnnnnaggatccccgtcgcggcacttttgcgtccttttgctgtgctcgccgcactcgtttctgcggctctgcgggtctgacacgctgcctaccatggcgtgcccatcgtgctcgctgctgtcgcgctgtttctcacccgcgacgattcctactgaccggctgcagtcggtgtggctggccccgggctcaagcgagctgcgggtcaatttcgaccagcgctgtttggtgttccgacacgtctatagctacgaacacggcaccgagtgggcggcaggacgtggtagcccgggccaatgcgctcgggacggcgtcaatagtgcgtagcgacgagatacactcggcatgatcggaggtctcgttcgatgcgggatggcgtcggagcggggatcggattggccacgtaggtagaggaggggacggcggcggtgtgcgggcagcgtgtgtgggcacgggaagcgttgtgttgtgcatgcgagggcgcaaaattttggggcaggcgggtaggtttgatttttggcgcctcgatagctcagttgggagagcgtcagactgaagatctgaaggtccctggttcgatcccgggtcgcggcacttttgcgtccttttgctgtgctcgccgcactcgtttctgcggctctgcgggtctggcacgctgcctaccatggcgtgcccatcgtgctcgctgctgtcgcgctgtttctcacccgcgacgattcctactgaccggctgcagtcggtgtggctggccccgggctcaagcgagctgcgggtcaatttcgaccagcgctgtttggtgttccgacacgtctatagctacgaacacggcaccgagtgggcggcaggacgtggtagcccgggccaatgcgctcgggacggcgtcaatagtgcgtagcgacgagatacactcggcatgatcggaggtctcgttcgatgcgggatggcgtcggagcggggatcggattggccacgtaggtagaggaggggacggcggcggtgtgcgggcagcgtgtgtgggcacgggaagcgttgtgttgtgcatgcgagggcgcaaaattttggggcaggcgggtaggtttgacttttggcgcctcgatagctcagttgggagagcgtcagactgaagatctgaaggtccctggttcgatcccgggtcgcggcacttttgcgtccttttgctgtgctcgccgcactcgtttctgcggctctgcgggtctggcacgctgcctaccatggcgtgcccatcgtgctcgctgctgtcgcgctgtttctcacccgcgacgattcctactgaccggctgcagtcggtgtggctggccccgggctcaagcgagctgcgggtcaatttcgaccagcgctgtttggtgttccgacacgtctatagctacgaacacggcaccgagtgggcggcaggacgtggtagcccgggccaatgcgctcgggacggcgtcaatagtgcgtagcgacgagatacactcggcatgatcggaggtctcgttcgatgcgggatggcgtcggagcggggatcggattggccacgtaggtagaggaggggacggcggcggtgtgcgggcagcgtgtgtgggcacgggaagcgttgtgttgtgcatgcgagggcgcaaaattttggggcaggcgggtaggtttgacttttggcgcctcgatagctcagttgggagagcgtcagactgaagatctgaaggtccctggttcgatcccgggtcgcggcacttttgcgtccttttgctgtgctcgccgcactcgtttctgcggctctgcgggtctggcacgctgcctaccatggcgtgcccatcgtgctcgctgctgccgcgctgtttctcacccgcgacgattcctactgaccggctgcagtcggtgtggctggccccgggctcaagcgagctgcgggtcaatttcgaccagcgctgtttggtgttccgacacgtgtatagctacgaacacggcaccgagtgggcggcaggacgtggtagcccgggccaatgcgctcgggacggcgtcaatagtgcgtagcgacgagatacactcggcatgatcggaggtctcgttcgatgcgggatggcgtcggagcggggatcggattggccacgtaggtagaggaggggacggcggcggtgtgcgggcagcgtgtgtgggcacgggaagcgttgtgttgtgcatgcgagggcgcaaaattttggggcaggcgggtaggtttgatttttggcgcctcgatagctcagttgggagagcgtcagactgaagatctgaaggtccctggttcgatcccgggtcgcggcacttttgcgtccttttgctgtgctcgccgcactcgtttctgcggatctgcactgtctggcacgctgcctaccatggcgtgcccatcgtgctcgctgctgtcgcgctgtttctcacccgcgacgattcctactgaccggctgcagtcggtgtggctggccccgggctcaagcgagctgcgggtcaatttcgaccagcgctgtttggtgttccgacacgtgtatagctacgaacacggcaccgagtgggcggcaggacgtggtagcccgggccaatgcgctcgggacggcgtcaatagtgcgtagcgacgagatacactcggcatgatcggaggtctcgttcgatgcgggatggcgtcggagcggggatcggattggccacgtaggtagaggaggggacggcggcggtgtgcgggcagcgtgtgtgggcacgggaagcgttgtgttgtgcatgcgagggcgcaaaattttggggcaggcgggtaggtttgacttttggcgcctcgatagctcagttgggagagcgtcagactgaagatctgaaggtccctggttcgatcccgggtcgcggcacttttgcgtccttttgctgtgctcgccgcactcgtttctgcggctctgcgggtctggcacgctgcctaccatggcgtgcccatcgtgctcgctgctgccgcgctgtttctcacccgcgacgattcctactgaccggctgcagtcggtgtggctggccccgggctcaagcgagctgcgggtcaatttcgaccagcgctgtttggtgttccgacacgtctatagctacgaacacggcaccgagtgggcggcaggacgtggtagcccgggccaatgcgctcgggacggcgtcaatagtgcgtagcgacgagatacactcggcatgatcggaggtctcgttcgatgcgggatggcgtcggagcggggatcggattggccacgtaggtagaggaggggacggcggcggtgtgcgggcagcgtgtgtgggcacgggaagcgttgtgttgtgcatgcgagggcgcaaaattttggggcaggcgggtaggtttgacttgtggcgcctcgatagctcagttgggagagcgtcagactgaagatctgaaggtccctggttcgatcccgggtcgcggcacttttgcgtccttttgctgtgctcgccgcactcgtttctgcggctctgcgggtctggcacgctgcctaccatggcgtgcccatcgtgctcgctgctgccgcgctgtttctcacccgcgacgattcctactgaccggctgcagtcggtgtggctggccccgggctcaagcgagctgcgggtcaatttcgaccagcgctgtttggtgttccgacacgtgtatagctacgaacacggcaccgagtgggcggcaggacgtggtagcccgggccaatgcgctcgggacggcgtcaatagtgcgtagcgacgagatacactcggcatgatcggaggtctcgttcgatgcgggatggcgtcggagcggggatcggattggccacgtaggtagaggaggggacggcggcggtgtgcgggcagcgtgtgtgggcacgggaagcgttgtgttgtgcatgcgagggcgcaaaatttgggggcaggcgggtaggtttgacttttggcgcctcgatagctcagttgggagagcgtcagactgaagatctgaaggtccctggttcgatcccgggtcgcggcacttttgcgtccttttgctgtgctcgccgcactcgtttctgcggctctgcgggtctggcacgctgcctaccatggcgtgcccatcgtgctcgctgctgccgcgctgtttctcacccgcgacgattcctactgaccggctgcagtcggtgtggctggccccgggctcaagcgagctgcgggtcaatttcgaccagcgctgtttggtgttccgacacgtctatagctacgaacacggcaccgagtgggcggcaggacgtggtagcccgggccaatgcgctcgggacggcgtcaatagtgcgtagcgacgagatacactcggcatgatcggaggtctcgttcgatgcgggatggcgtcggagcggggatcggattggccacgtaggtagaggaggggacggcggcggtgtgcgggcagcgtgtgtgggcacgggaagcgttgtgttgtgcatgcgagggcgcaaaatttgggggcaggcgggtaggtttgatttttggcgcctcgatagctcagttgggagagcgtcagactgaagatctgaaggtccctggttcgatcccgggtcgcggcacttttgcgtccttttgctgtgctcgccgcactcgtttctgcggctctgcgggtctgacacgctgcctaccatggcgtgcccatcgtgctcgctgctgccgcgctgtttctcacccgcgacgactcctactgaccggctgcagtcggtgtggctggccccgggctcaagcgagctgcgggtcaatttcgaccagcgctgtttggtgttccgacacgtctatagctacgaacacggcaccgagtgggcggcaggacgtggtagcccgggccaatgcgctcgggacggcgtcaatagtgcgtagcgacgagatacactcggcatgatcggaggtctcgttcgatgcgggatggcgtcggagcggggatcggattggccacgtaggtagaggaggggacggcggcggtgtgcgggcagcgtgtgtgggcacgggaagcgttgtgttgtgcatgcgagggcgcaaaatttgggggcaggcgggtaggtttgacttttggcgcctcgatagctcagttgggagagcgtcagactgaagatctgaaggtccctggttcgatcccgggtcgcggcacttttgcgtccttttgctgtgctcgccgcactcgtttctgcggctctgcgggtctggcacgctgcctaccatggcgtgcccatcgtgctcgctgctgccgcgctgtttctcacccgcgacgactcctactgaccggctgcagtcggtgtggctggccccgggctcaagcgagctgtgggtcaatttcgaccagcgctgtttggtgttccgacacgtctatagctacgaacacggcaccgagtgggcggcaggacgtggtagcccgggccaatgcgctcgggacggcgtcaatagtgcgtagcgacgagatacactcggcatgatcggaggtctcgttcgatgcgggatggcgtcggagcggggatcggattggccacgtaggtagaggaggggacggcggcggtgtgcgggcagcgtgtgtgggcacgggaagcgttgtgttgtgcatgcgagggcgcaaaattttggggcaggcgggtaggtttgacttttggcgcctcgatagctcagttgggagagcgtcactgaagatctgaaggtccctggttcgatcccgggtcgcggcacttttgcgtccttttgctgtgctcgccgcactcgtttctgcggctctgcgggtctgacacgctgcctaccatggcgtgcccatcgtgctcgctgctgccgcgctgtttctcacccgcgacgattcctactgaccggctgcagtcggtgtggctggccccgggctcaagcgagctgtgggtcaatttcgaccagcgctgtttggtgttccgacacgtctatagctacgaacacggcaccgagtgggcggcaggacgtggtagcccgggccaatgcgctcgggacggcgtcaatagtgcgtagcgacgagatacactcggcatgatcggaggtctcgttcgatgcgggatggcgtcggagcggggatcggattggccacgtaggtagaggaggggacggcggcggtgtgcgggcagcgtgtgtgggcacgggaagcgttgtgttgtgcatgcgagggcgcaaaattttggggcaggcgggtaggtttgacttttggcgcctcgatagctcagttgggagagcgtcactgaagatctgaaggtccctggttcgatcccgggtcgcggcacttttgcgtccttttgctgtgctcgccgcactcgtttctgcggctctgcggtgtctggcacgctgcctaccatggcgtgcccatcgtgctcgctgctgtcgcgctgtttctcacccgcgacgactcctactgaccggctgcagtcggtgtggctggccccgggctcaagcgagctgtgggtcaatttcgaccagcgctgtttggtgttccgacacgtgtatagctacgaacacggcaccgagtgggcggcaggacgtggtagcccgggccaatgcgctcgggacggcgtcaatagtgcgtagcgacgagatacactcggcatgatcggaggtctcgttcgatgcgggatggcgtcggagcggggatcggattggccacgtaggtagaggaggggacggcggcggtgtgcgggcagcgtgtgtgggcacgggaagcgttgtgttgtgcatgcgagggcgcaaaattttggggcaggcgggtaggtttgatttttggcgcctcgatagctcagttgggagagcgtcagactgaagatctgaaggtccctggttcgatcccgggtcgcggcacttttgcgtccttttgctgtgctcgccgcactcgtttctgcggctctgcggtgtctggcacgctgcctaccatggcgtgcccatcgtgctcgctgctgccgcgctgtttctcacccgcgacgactcctactgaccggctgcagtcggtgtggctggccccgggctcaagcgagctgcgggtcaatttcgaccagcgctgtttggtgttccgacacgtctatagctacgaacacggcaccgagtgggcggcaggacgtggtagcccgggccaatgcgctcgggacggcgtcaatagtgcgtagcgacgagatacactcggcatgatcggaggtctcgttcgatgcgggatggcgtcggagcggggatcggattggccacgtaggtagaggaggggacggcggcggtgtgcgggcagcgtgtgtgggcacgggaagcgttgtgttgtgcatgcgagggcgcaaaattttggggcaggcgggtaggtttgacttttggcgcctcgatagctcagttgggagagcgtcactgaagatctgaaggtccctggttcgatcccgggtcgcggcacttttgcgtccttttgctgtgctcgccgcactcgtttctgcggctctgcggtgtctggcacgctgcctaccatggcgtgcccatcgtgctcgctgctgccgcgctgtttctcacccgcgacgactcctactgaccggctgcagtcggtgtggctggccccgggctcaagcgagctgtgggtcaatttcgaccagcgctgtttggtgttccgacacgtctatagctacgaacacggcaccgagtgggcggcaggacgtggtagcccgggccaatgcgctcgggacggcgtcaatagtgcgtagcgacgagatacactcggcatgatcggaggtctcgttcgatgcgggatggcgtcggagcggggatcggattggccacgtaggtagaggaggggacggcggcggtgtgcgggcagcgtgtgtgggcacgggaagcgttgtgttgtgcatgcgagggcgcaaaattttggggcaggcgggtaggtttgacttttggcgcctcgatagctcagttgggagagcgtcactgaagatctgaaggtccctggttcgatcccgggtcgcggcacttttgcgtccttttgctgtgctcgccgcactcgtttctgcggctctgcggtgtctggcacgctgcctaccatggcgtgcccatcgtgctcgctgctgccgcgctgtttctcacccgcgacgactcctactgaccggctgcagtcggtgtggctggccccgggctcaagcgagctgtgggtcaatttcgaccagcgctgtttggtgttccgacacgtctatagctacgaacacggcaccgagtgggcggcaggacgtggtagcccgggccaatgcgctcgggacggcgtcaatagtgcgtagcgacgagatacactcggcatgatcggaggtctcgttcgatgcgggatggcgtcggagcggggatcggattggccacgtaggtagaggaggggacggcggcggtgtgcgggcagcgtgtgtgggcacgggaagcgttgtgttgtgcatgcgagggcgcaaaattttggggcaggcgggtaggtttgatttttggcgcctcgatagctcagttgggagagcgtcactgaagatctgaaggtccctggttcgatcccgggtcgcggcacttttgcgtccttttgctgtgctcgccgcactcgtttctgcggctctgcggtgtctggcacgctgcctaccatggcgtgcccatcgtgctcgctgctgccgcgctgtttctcacccgcgacgactcctactgaccggctgcagtcggtgtggctggccccgggctcaagcgagctgtgggtcaatttcgaccagcgctgtttggtgttccgacacgtgtatagctacgaacacggcaccgagtgggcggcaggacgtggtagcccgggccaatgcgctcgggacggcgtcaatagtgcgtagcgacgagatacactcggcatgatcggaggtctcgttcgatgcgggatggcgtcggagcggggatcggattggccacgtaggtagaggaggggacggcggcggtgtgcgggcagcgtgtgtgggcacgggaagcgttgtgttgtgcatgcgagggcgcaaaattttggggcaggcgggtaggtttgacttttggcgcctcgatagctcagttgggagagcgtcactgaagatctgaaggtccctggttcgatcccgggtcgcggcacttttgcgtccttttgctgtgctcgccgcactcgtttctgcggctctgcggtgtctggcacgctgcctaccatggcgtgcccatcgtgctcgctgctgccgcgctgtttctcacccgcgacgattcctactgaccggctgcagtcggtgtggctggccccgggctcaagcgagctgtgggtcaatttcgaccagcgctgtttggtgttccgacacgtgtatagctacgaacacggcaccgagtgggcggcaggacgtggtagcccgggccaatgcgctcgggacggcgtcaatagtgcgtagcgacgagatacactcggcatgatcggaggtctcgttcgatgcgggatggcgtcggagcggggatcggattggccacgtaggtagaggaggggacggcggcggtgtgcgggcagcgtgtgtgggcacgggaagcgttgtgttgtgcatgcgagggcgcaaaattttggggcaggcgggtaggtttgacttgtggcgcctcgatagctcagttgggagagcgtcagactgaagatctgaaggtccctggttcgatcccgggtcgcggcacttttgcgtccttttgctgtgctcgccgcactcgtttctgcggctctgcgggtctgacacgctgcctaccatggcgtgcccatcgtgctcgctgctgtcgcgctgtttctcacccgcgacgattcctactgaccggctgcagtcggtgtggctggccccgggctcaagcgagctgcgggtcaatttcgaccagcgctgtttggtgttccgacacgtctatagctacgaacacggcaccgagtgggcggcaggacgtggtagcccgggccaatgcgctcgggacggcgtcaatagtgcgtagcgacgagatacactcggcatgatcggaggtctcgttcgatgcgggatggcgtcggagcggggatcggattggccacgtaggtagaggaggggacggcggcggtgtgcgggcagcgtgtgtgggcacgggaagcgttgtgttgtgcatgcgagggcgcaaaattttggggcaggcgggtaggtttgatttttggcgcctcgatagctcagttgggagagcgtcagactgaagatctgaaggtccctggttcgatcccgggtcgcggcacttttgcgtccttttgctgtgctcgccgcactcgtttctgcggctctgcgggtctggcacgctgcctaccatggcgtgcccatcgtgctcgctgctgccgcgctgtttctcacccgcgacgattcctactgaccggctgcagtcggtgtggctggccccgggctcaagcgagctgcgggtcaatttcgaccagcgctgtttggtgttccgacacgtgtatagctacgaacacggcaccgagtgggcggcaggacgtggtagcccgggccaatgcgctcgggacggcgtcaatagtgcgtagcgacgagatacactcggcatgatcggaggtctcgttcgatgcgggatggcgtcggagcggggatcggattggccacgtaggtagaggaggggacggcggcggtgtgcgggcagcgtgtgtgggcacgggaagcgttgtgttgtgcatgcgagggcgcaaaattttggggcaggcgggtaggtttgacttttggcgcctcgatagctcagttgggagagcgtcagactgaagatctgaaggtccctggttcgatcccgggtcgcggcacttttgcgtccttttgctgtgctcgccgcactcgtttctgcggctctgcgggtctggcacgctgcctaccatggcgtgcccatcgtgctcgctgctgccgcgctgtttctcacccgcgacgattcctactgaccggctgcagtcggtgtggctggccccgggctcaagcgagctgcgggtcaatttcgaccagcgctgtttggtgttccgacacgtctatagctacgaacacggcaccgagtgggcggcaggacgtggtagcccgggccaatgcgctcgggacggcgtcaatagtgcgtagcgacgagatacactcggcatgatcggaggtctcgttcgatgcgggatggcgtcggagcggggatcggattggccacgtaggtagaggaggggacggcggcggtgtgcgggcagcgtgtgtgggcacgggaagcgttgtgttgtgcatgcgagggcgcaaaattttggggcaggcgggtaggtgtgatttttggcgcctcgatagctcagttgggagagcgtcagactgaagatctgaaggtccctggttcgatcccgggtcgcggcacttttgcgtccttttgctgtgctcgccgcactcgtttctgcgcctctgcgggtctgacacgctgcctacaatggcgtgcccatcgtgctcgctgctgtcgcgctgtttctcacccgtgacgactcctactgaccggctgcagtcggtgtggctggccccgggctcaagcgagctgcgggtcaatttcgaccagcgctgtttggtgttccgacacgtgtatagctacgaacacggcaccgagtgggcggcaggacgtggtagcccgggccaatgcgctcgggacggcgtcaatagtgcgtagcgacgagatacactcggcatgatcggaggtctcgttcgatgcgggatggcgtcggagcggggatcggattggccacgtaggtagaggaggggacggcggtggtgtgcgggcagcgtgtgtgggcacgggaagcgttgtgttgtgcatgcgagggcgcaaaattttggggcaggcgggtaggtttgatttttggcgcctcgatagctcagttgggagagcgtcagactgaagatctgaaggtccctggttcgatcccgggtcgcggcacttttgcgtccttttgctgtgctcgccgcactcgtttctgcggctctgcgggtctggcacgctgcctaccatggcgtgcccatcgtgctcgctgctgccgcgctgtttctcacccgcgacgattcctactgaccggctgcagtcagtgtggctggccccgggctcaagcgagctgcgggtcaatttcgaccagcgctgtttggtgttccgacacgtgtatagctacgaacacggcaccgagtgggcggcaggacgtggtagcccgggccaatgcgctcgggacggcgtcaatagtgcgtagcgacgagatacactcggcatgatcggaggtctcgttcgatgcgggatggcgtcggagcggggatcggattggccacgtaggtagaggaggggacggcggcggtgtgcgggcagcgtgtgtgggcacgggaagcgttgtgttgtgcatgcgagggcgcaaaattttggggcaggcgggtaggtttgatttttggcgcctcgatagctcagttgggagagcgtcagactgaagatctgaaggtccctggttcgatcccgggtcgcggcacttttgcgtccttttgctgtgctcgccgcactcgtttctgcggctctgcgggtctggcacgctgcctaccatggcgtgcccatcgtgctcgctgctgccgcgctgtttctcacccgcgacgattcctactgaccggctgcagtcagtgtggctggccccgggctcaagcgagctgcgggtcaatttcgaccagcgctgtttggtgttccgacacgtgtatagctacgaacacggcaccgagtgggcggcaggacgtggtagcccgggccaatgcgctcgggacggcgtcaatagtgcgtagcgacgagatacactcggcatgatcggaggtctcgttcgatgcgggatggcgtcggagcggggatcggattggccacgtaggtagaggaggggacggcggcggtgtgcgggcagcgtgtgtgggcacgggaagcgttgtgttgtgcatgcgagggcgcaaaattttggggcaggcgggtaggtttgatttttggcgcctcgatagctcagttgggagagcgtcagactgaagatctgaaggtccctggttcgatcccgggtcgcggcacttttgcgtccttttgctgtgctcgccgcactcgtttctgcggctctgcgggtctgacacgctgcctaccatggcgtgcccatcgtgctcgctgctgtcgcgctgtttctcacccgcgacgattcctactgaccggctgcagtcggtgtggctggccccgggctcaagcgagctgcgggtcaatttcgaccagcgctgtttggtgttccgacacgtctatagctacgaacacggcaccgagtgggcggcaggacgtggtagcccgggccaatgcgctcgggacggcgtcaatagtgcgtagcgacgagatacactcggcatgatcggaggtctcgttcgatgcgggatggcgtcggagcggggatcggattggccacgtaggtagaggaggggacggcggcggtgtgcgggcagcgtgtgtgggcacgggaagcgttgtgttgtgcatgcgagggcgcaaaattttggggcaggcgggtaggtttgacttttggcgcctcgatagctcagttgggagagcgtcagactgaagatctgaaggtccctggttcgatcccgggtcgcggcacttttgcgtccttttgctgtgctcgccgcactcgtttctgcggctctgcgggtctgacacgctgcctaccatggcgtgcccatcgtgctcgctgcagtcgcgctatttctcacccgtgacgactcctactgaccggctgcagtcagtgtggctggccccgggctcaagcgagctgcgggtcaatttcgaccagcgctgtttggtgttccgacacgtctatagctacgaacacggcaccgagtgggcggcaggacgtggtagcccgggccaatgcgctcgggacggcgtcaatagtgcgtagcgacgagatacactcggcatgatcggaggtctcgttcgatgcgggatggcgtcggagcggggatcggattggccacgtaggtagaggaggggacggcggcggtgtgcgggcagcgtgtgtgggcacgggaagcgttgtgttgtgcatgcgagggcgcaaaattttggggcaggcgggtaggtttgacttttggcgcctcgatagctcagttgggagagcgtcagactgaagatctgaaggtccctggttcgatcccgggtcgcggcacttttgcgtccttttgctgtgctcgccgcactcgtttctgcggctctgcgggtctgacacgctgcctaccatggcgtgcccatcgtgctcgctgctgtcgcgctatttctcacccgtgacgactcctactgaccggctgcagtcagtgtggctggccccgggctcaagcgagctgcgggtcaatttcgaccagcgctgtttggtgttccgacacgtctatagctacgaacacggcaccgagtgggcggcaggacgtggtagcccgggccaatgcgctcgggacggcgtcaatagtgcgtagcgacgagatacactcggcatgatcggaggtctcgttcgatgcgggatggcgtcggagcggggatcggattggccacgtaggtagaggaggggacggcggcggtgtgcgggcagcgtgtgtgggcacgggaagcgttgtgttgtgcatgcgagggcgcaaaattttggggcaggcgggtaggtttgacttttggcgcctcgatagctcagttgggagagcgtcagactgaagatctgaaggtccctggttcgatcccgggtcgcggcacttttgcgtccttttgctgtgctcgccgcactcgtttctgcggctctgcgggtctgacacgctgcctaccatggcgtgcccatcgtgctcgctgctgccgcgctgtttctcacccgcgacgattcctactgaccggctgcagtcggtgtggctggccccgggctcaagcgagctgcgggtcaatttcgaccagcgctgtttggtgttccgacacgtctatagctacgaacacggcaccgagtgggcggcaggacgtggtagcccgggccaatgcgctcgggacggcgtcaatagtgcgtagcgacgagatacactcggcatgatcggaggtctcgttcgatgcgggatggcgtcggagcggggatcggattggccacgtaggtagaggaggggacggcggcggtgtgcgggcagcgtgtgtgggcacgggaagcgttgtgttgtgcatgcgagggcgcaaaattttggggcaggcgggtaggtttgatttttggcgcctcgatagctcagttgggagagcgtcagactgaagatctgaaggtccctggttcgatcccgggtcgcggcacttttgcgtccttttgctgtgctcgccgcactcgtttctgcggctctgcgggtctggcacgctgcctaccatggcgtgcccatcgtgctcgctgctgccgcgctgtttctcacccacgacgactggctgcagtcggtgtggctggccccgggctcaagcgagctgcgggtcaatttcgaccagcgctgtttggtgttccgacacgtgtatagctacgaacacggcaccgagtgggcggcaggacgtggtagcccgggccaatgcgctcgggacggcgtcaatagtgcgtagcgacgagatacactcggcatgatcggaggtctcgttcgatgcgggatggtgtcggagcggggatcggattggccacgtaggtagaggaggggacggcggcggtgtgcgggcagcgtgtgtgggcacgggaagcgttgtgttgtgcatgcgagggcgcaaaattttggggcaggcgggtaggtttgacttttggcgcctcgatagctcacttgggagagcgtcagactgaagatctgaaggtccctggttcgatcccgggtcgcggcacttttgcgtccttttgctgtgctcgccgcactcgtttctgcgactctgcgggtctgacacgctgcctaccatggcgtgcccatcgtgctcgctgctgtcgcgctgtttctcacccgtgacgactcctactgaccggctgcagtcggtgtggctggccccgggctcaagcgagctgcgggtcaatttcgaccagcgctgtttggtgttccgacacgtctatagctacgaacacggcaccgagtgggcggcaggacgtggtagcccgggccaatgcgctcgggacggcgtcaatagtgcgtagcgacgagatacactcggcatgatcggaggtctcgttcgatgcgggatggcgtcggagcggggatcggattggccacgtaggtagaggaggggacggcggcggtgtgcgggcagcgtgtgtgggcacgggaagcgttgtgttgtgcatgcgagggcgcaaaattttggggcaggcgggtaggtttgatttttggcgcctcgatagctcagttgggagagcgtcagactgaagatctgaaggtccctggttcgatcccgggtcgcggcacttttgcgtccttttgctgtgctcgccgcactcgtttctgcgactctgcgggtctgacacgctgcctaccatggcgtgcccatcgtgctcgctgctgtcgcgctgtttctcacccgtgacgactcctactgaccggctgcagtcggtgtggctggccccgggctcaagcgagctgcgggtcaatttcgaccagcgctgtttggtgttccgacacgtctatagctacgaacacggcaccgagtgggcggcaggacgtggtagcccgggccaatgcgctcgggacggcgtcaatagtgcgtagcgacgagatacactcggcatgatcggaggtctcgttcgatgcgggatggcgtcggagcggggatcggattggccacgtaggtagaggaggggacggcggcggtgtgcgggcagcgtgtgtgggcacgggaagcgttgtgttgtgcatgcgagggcgcaaaattttggggcaggcgggtaggtttgacttttggcgcctcgatagctcagttgggagagcgtcagactgaagatctgaaggtccctggttcgatcccgggtcgcggcacttttgcgtccttttgctgtgctcgccgcactcgtttctgcggctctgcgggtctgacacgctgcctaccatggcgtgcccatcgtgctcgctgctgccgcgctgtttctcacccgcgacgactcctactgaccggctgcagtcggtgtggctggccccgggctcaagcgagctgcgggtcaatttcgaccagcgctgtttggtgttccgacacgtctatagctacgaacacggcaccgagtgggcggcaggacgtggtagcccgggccaatgcgctcgggacggcgtcaatagtgcgtagcgacgagatacactcggcatgatcggaggtctcgttcgatgcgggatggcgtcggagcggggatcggattggccacgtaggtagaggaggggacggcggcggtgtgcgggcagcgtgtgtgggcacgggaagcgttgtgttgtgcatgcgagggcgcaaaattttggggcaggcgggtaggtttgatttttggcgcctcgatagctcagttgggagagcgtcagactgaagatctgaaggtccctggttcgatcccgggtcgcggcacttttgcgtccttttgctgtgctcgccgcactcgtttctgcgcctctgcgggtctgacacgctgcctaccatggcgtgcccatcgtgctcgctgctgtcgcgctgtttctcacccgtgacgactcctactgaccggctgcagtcggtgtggctggccccgggctcaagcgagctgcgggtcaatttcgaccagcgctgtttggtgttccgacacgtgtatagctacgaacacggcaccgagtgggcggcaggacgtggtagcccgggccaatgcgctcgggacggcgtcaatagtgcgtagcgacgagatacactcggcatgatcggaggtctcgttcgatgcgggatggcgtcggagcggggatcggattggccacgtaggtagaggaggggacggcggcggtgtgcgggcagcgtgtgtgggcacgggaagcgttgtgttgtgcatgcgagggcgcaaaattttggggcaggcgggtaggtttgacttttggcgcctcgatagctcagttgggagagcgtcactgaagatctgaaggtccctggttcgatcccgggtcgcggcacttttgcgtccttttgctgtgctcgccgcactcgtttctgcggctctgcgggtctgacacgctgcctaccatggcgtgcccatcgtgctcgctgctgccgcgctgtttctcacccgcgacgattcctactgaccggctgcagtcggtgtggctggccccgggctcaagcgagctgcgggtcaatttcgaccagcgctgtttggtgttccgacacgtgtatagctacgaacacggcaccgagtgggcggcaggacgtggtagcccgggccaatgcgctcgggacggcgtcaatagtgcgtagcgacgagatacactcggcatgatcggaggtctcgttcgatgcgggatggcgtcggagcggggatcggattggccacgtaggtagaggaggggacggcggcggtgtgcgggcagcgtgtgtgggcacgggaagcgttgtgttgtgcatgcgagggcgcaaaattttggggcaggcgggtaggtttgatttttggcgcctcgatagctcagttgggagagcgtcagactgaagatctgaaggtccctggttcgatcccgggtcgcggcacttttgcgtccttttgctgtgctcgccgcactcgtttctgcggctctgcgggtctgacacgctgcctaccatggcgtgcccatcgtgctcgctgctgtcgcgctgtttctcacccgtgacgattcctactgaccggctgcagtcggtgtggctggccccgggctcaagcgagctgcgggtcaatttcgaccagcgctgtttggtgttccgacacgtgtatagctacgaacacggcaccgagtgggcggcaggacgtggtagcccgggccaatgcgctcgggacggcgtcaatagtgcgtagcgacgagatacactcggcatgatcggaggtctcgttcgatgcgggatggcgtcggagcggggatcggattggccacgtaggtagaggaggggacggcggcggtgtgcgggcagcgtgtgtgggcacgggaagcgttgtgttgtgcatgcgagggcgcaaaattttggggcaggcgggtaggtttgatttttggcgcctcgatagctcagttgggagagcgtcagactgaagatctgaaggtccctggttcgatcccgggtcgcggcacttttgcgtccttttgctgtgctcgccgcactcgtttctgcggctctgcgggtctgacacgctgcctaccatggcgtgcccatcgtgctcgctgctgccgcgctgtttctcacccgcgacgattcctactgaccggctgcagtcggtgtggctggccccgggctcaagcgagctgtgggtcaatttcgaccagcgctgtttggtgttccgacacgtgtatagctacgaacacggcaccgagtgggcggcaggacgtggtagcccgggccaatgcgctcgggacggcgtcaatagtgcgtagcgacgagatacactcggcatgatcggaggtctcgttcgatgcgggatggcgtcggagcggggatcggattggccacgtaggtagaggaggggacggcggcggtgtgcgggcagcgtgtgtgggcacgggaagcgttgtgttgtgcatgcgagggcgcaaaattttggggcaggcgggtaggtttgacttttggcgcctcgatagctcagttgggagagcgtcactgaagatctgaaggtccctggttcgatcccgggtcgcggcacttttgcgtccttttgctgtgctcgccgcactcgtttctgcggctctgcggtgtctggcacgctgcctaccatggcgtgcccatcgtgctcgctgctgtcgcgctgtttctcacccgcgacgattcctactgaccggctgcagtcggtgtggctggccccgggctcaagcgagctgcgggtcaatttcgaccagcgctgtttggtgttccgacacgtctatagctacgaacacggcaccgagtgggcggcaggacgtggtagcccgggccaatgcgctcgggacggcgttaatagtgcgtagcgacgagatacactcggcatgatcggaggtctcgttcgatgcgggatggcgtcggagcggggatcggattggccacgtaggtagaggaggggacggcggcggtgtgcgggcagcgtgtgtgggcacgggaagcgttgtgttgtgcatgcgagggcgcaaaattttggggcaggcgggtaggtttgacttttggcgcctcgatagctcagttgggagagcgtcactgaagatctgaaggtccctggttcgatcccgggtcgcggcacttttgcgtccttttgctgtgctcgccgcactcgtttctgcggctctgcggtgtctggcacgctgcctaccatggcgtgcccatcgtgctcgctgctgtcgcgctgtttctcacccgcgacgattcctactgaccggctgcagtcggtgtggctggccccgggctcaagcgagctgcgggtcaatttcgaccagcgctgtttggtgttccgacacgtctatagctacgaacacggcaccgagtgggcggcaggacgtggtagcccgggccaatgcgctcgggacggcgtcaatagtgcgtagcgacgagatacactcggcatgatcggaggtctcgttcgatgcgggatggcgtcggagcggggatcggattggccacgtaggtagaggaggggacggcggcggtgtgcgggcagcgtgtgtgggcacgggaagcgttgtgttgtgcatgcgagggcgcaaaattttggggcaggcgggtaggtttgacttttggcgcctcgatagctcagttgggagagcgtcactgaagatctgaaggtccctggttcgatcccgggtcgcggcacttttgcgtccttttgctgtgctcgccgcactcgtttctgcggctctgcggtgtctggcacgctgcctaccatggcgtgcccatcgtgctcgctgctgccgcgctgtttctcacccgcgacgattcctactgaccggctgcagtcggtgtggctggccccgggctcaagcgagctgtgggtcaatttcgaccagcgctgtttggtgttccgacacgtctatagctacgaacacggcaccgagtgggcggcaggacgtggtagcccgggccaatgcgctcgggacggcgtcaatagtgcgtagcgacgagatacactcggcatgatcggaggtctcgttcgatgcgggatggcgtcggagcggggatcggattggccacgtaggtagaggaggggacggcggcggtgtgcgggcagcgtgtgtgggcacgggaagcgttgtgttgtgcatgcgagggcgcaaaatttgggggcaggcgggtaggtttgacttttggcgcctcgatagctcagttgggagagcgtcactgaagatctgaaggtccctggttcgatcccgggtcgcggcacttttgcgtccttttgctgtgctcgccgcactcgtttctgcggctctgcggtgtctggcacgctgcctaccatggcgtgcccatcgtgctcgctgctgccgcgctgtttctcacccgcgacgactcctactgaccggctgcagtcggtgtggctggccccgggctcaagcgagctgtgggtcaatttcgaccagcgctgtttggtgttccgacacgtgtatagctacgaacacggcaccgagtgggcggcaggacgtggtagcccgggccaatgcgctcgggacggcgtcaatagtgcgtagcgacgagatacactcggcatgatcggaggtctcgttcgatgcgggatggcgtcggagcggggatcggattggccacgtaggtagaggaggggacggcggcggtgtgcgggcagcgtgtgtgggcacgggaagcgttgtgttgtgcatgcgagggcgcaaaattttggggcaggcgggtaggtttgacttttggcgcctcgatagctcagttgggagagcgtcactgaagatctgaaggtccctggttcgatcccgggtcgcggcacttttgcgtccttttgctgtgctcgccgcactcgtttctgcggctctgcggtgtctggcacgctgcctaccatggcgtgcccatcgtgctcgctgctgccgcgctgtttctcacccgcgacgactcctactgaccggctgcagtcggtgtggctggccccgggctcaagcgagctgtgggtcaatttcgaccagcgctgtttggtgttccgacacgtgtatagctacgaacacggcaccgagtgggcggcaggacgtggtagcccgggccaatgcgctcgggacggcgtcaatagtgcgtagcgacgagatacactcggcatgatcggaggtctcgttcgatgcgggatggcgtcggagcggggatcggattggccacgtaggtagaggaggggacggcggcggtgtgcgggcagcgtgtgtgggcacgggaagcgttgtgttgtgcatgcgagggcgcaaaattttggggcaggcgggtaggtttgacttttggcgcctcgatagctcagttgggagagcgtcactgaagatctgaaggtccctggttcgatcccgggtcgcggcacttttgcgtccttttgctgtgctcgccgcactcgtttctgcggctctgcggtgtctggcacgctgcctaccatggcgtgcccatcgtgctcgctgctgccgcgctgtttctcacccgcgacgactcctactgaccggctgcagtcggtgtggctggccccgggctcaagcgagctgtgggtcaatttcgaccagcgctgtttggtgttccgacacgtctatagctacgaacacggcaccgagtgggcggcaggacgtggtagcccgggccaatgcgctcgggacggcgtcaatagtgcgtagcgacgagatacactcggcatgatcggaggtctcgttcgatgcgggatggcgtcggagcggggatcggattggccacgtaggtagaggaggggacggcggcggtgtgcgggcagcgtgtgtgggcacgggaagcgttgtgttgtgcatgcgagggcgcaaaatttgggggcaggcgggtaggtttgatttttggcgcctcgatagctcagttgggagagcgtcagactgaagatctgaaggtccctggttcgatcccgggtcgcggcacttttgcgtccttttgctgtgctcgccgcactcgtttctgcggctctgcgggtctgacacgctgcctaccatggcgtgcccatcgtgctcgctgctgtcgcgctgtttctcacccgtgacgactcctactgaccggctgcagtcggtgtggctggccccgggctcaagcgagctgcgggtcaatttcgaccagcgctgtttggtgttccgacacgtctatagctacgaacacggcaccgagtgggcggcaggacgtggtagcccgggccaatgcgctcgggacggcgtcaatagtgcgtagcgacgagatacactcggcatgatcggaggtctcgttcgatgcgggatggcgtcggagcggggatcggattggccacgtaggtagaggaggggacggcggcggtgtgcgggcagcgtgtgtgggcacgggaagcgttgtgttgtgcatgcgagggcgcaaaattttggggcaggcgggtaggtttgacttttggcgcctcgatagctcagttgggagagcgtcactgaagatctgaaggtccctggttcgatcccgggtcgcggcacttttgcgtccttttgctgtgctcgccgcactcgtttctgcggctctgcggtgtctgacacgctgcctaccatggcgtgcccatcgtgctcgctgctgccgcgctgtttctcacccgcgacgattcctactgaccggctgcagtcggtgtggctggccccgggctcaagcgagctgcgggtcaatttcgaccagcgctgtttggtgttccgacacgtctatagctacgaacacggcaccgagtgggcggcaggacgtggtagcccgggccaatgcgctcgggacggcgtcaatagtgcgtagcgacgagatacactcggcatgatcggaggtctcgttcgatgcgggatggcgtcggagcggggatcggattggccacgtaggtagaggaggggacggcggcggtgtgcgggcagcgtgtgtgggcacgggaagcgttgtgttgtgcatgcgagggcgcaaaattttggggcaggcgggtaggtttgacttttggcgcctcgatagctcagttgggagagcgtcactgaagatctgaaggtccctggttcgatcccgggtcgcggcacttttgcgtccttttgctgtgctcgccgcactcgtttctgcggctctgcgggtctggcacgctgcctaccatggcgtgcccatcgtgctcgctgctgccgcgctgtttctcacccgcgacgactcctactgaccggctgcagtcggtgtggctggccccgggctcaagcgagctgcgggtcaatttcgaccagcgctgtttggtgttccgacacgtctatagctacgaacacggcaccgagtgggcggcaggacgtggtagcccgggccaatgcgctcgggacggcgtcaatagtgcgtagcgacgagatacactcggcatgatcggaggtctcgttcgatgcgggatggcgtcggagcggggatcggattggccacgtaggtagaggaggggacggcggcggtgtgcgggcagcgtgtgtgggcacgggaagcgttgtgttgtgcatgcgagggcgcaaaatttgggggcaggcgggtaggtttgacttttggcgcctcgatagctcagttgggagagcgtcagactgaagatctgaaggtccctggttcgatcccgggtcgcggcacttttgcgtccttttgctgtgctcgccgcactcgtttctgcggctctgcgggtctgacacgctgcctaccatggcgtgcccatcgtgctcgctgctgccgcgctgtttctcacccgcgacgactcctactgaccggctgcagtcggtgtggctggccccgggctcaagcgagctgcgggtcaatttcgaccagcgctgtttggtgttccgacacgtgtatagctacgaacacggcaccgagtgggcggcaggacgtggtagcccgggccaatgcgctcgggacggcgtcaatagtgcgtagcgacgagatacactcggcatgatcggaggtctcgttcgatgcgggatggcgtcggagcggggatcggattggccacgtaggtagaggaggggacggcggcggtgtgcgggcagcgtgtgtgggcacgggaagcgttgtgttgtgcatgcgagggcgcaaaattttggggcaggcgggtaggtttgacttttggcgcctcgatagctcagttgggagagcgtcagactgaagatctgaaggtccctggttcgatcccgggtcgcggcacttttgcgtccttttgctgtgctcgccgcactcgtttctgcggctctgcgggtctgacacgctgcctaccatggcgtgcccatcgtgctcgctgctgccgcgctgtttctcacccgtgacgactcctactgaccggctgcagtcggtgtggctggccccgggctcaagcgagctgcgggtcaatttcgaccagcgctgtttggtgttccgacacgtctatagctacgaacacggcaccgagtgggcggcaggacgtggtagcccgggccaatgcgctcgggacggcgtcaatagtgcgtagcgacgagatacactcggcatgatcggaggtctcgttcgatgcgggatggcgtcggagcggggatcggattggccacgtaggtagaggaggggacggcggcggtgtgcgggcagcgtgtgtgggcacgggaagcgttgtgttgtgcatgcgagggcgcaaaattttggggcaggcgggtaggtttgatttttggcgcctcgatagctcagttgggagagcgtcagactgaagatctgaaggtccctggttcgatcccgggtcgcggcacttttgcgtccttttgctgtgctcgccgcactcgtttctgcggctctgcgggtctgacacgctgcctaccatggcgtgcccatcgtgctcgctgctgtcgcgctgtttctcacccgtgacgactcctactgaccggctgcagtcggtgtggctggccccgggctcaagcgagctgcgggtcaatttcgaccagcgctgtttggtgttccgacacgtctatagctacgaacacggcaccgagtgggcggcaggacgtggtagcccgggccaatgcgctcgggacggcgtcaatagtgcgtagcgacgagatacactcggcatgatcggaggtctcgttcgatgcgggatggcgtcggagcggggatcggattggccacgtaggtagaggaggggacggcggcggtgtgcgggcagcgtgtgtgggcacgggaagcgttgtgttgtgcatgcgagggcgcaaaattttggggcaggcgggtaggtttgatttttggcgcctcgatagctcagttgggagagcgtcagactgaagatctgaaggtccctggttcgatcccgggtcgcggcacttttgcgtccttttgctgtgctcgccgcactcgtttctgcggctctgcgggtctgacacgctgcctaccatggcgtgcccatcgtgctcgctgctgccgcgctgtttctcacccgcgacgactcctactgaccggctgcagtcggtgtggctggccccgggctcaagcgagctgcgggtcaatttcgaccagcgctgtttggtgttccgacacgtctatagctacgaacacggcaccgagtgggcggcaggacgtggtagcccgggccaatgcgctcgggacggcgttaatagtgcgtagcgacgagatacactcggcatgatcggaggtctcgttcgatgcgggatggcgtcggagcggggatcggattggccacgtaggtagaggaggggacggcggcggtgtgcgggcagcgtgtgtgggcacgggaagcgttgtgttgtgcatgcgagggcgcaaaattttggggcaggcgggtaggtttgacttttggcgcctcgatagctcagttgggagagcgtcagactgaagatctgaaggtccctggttcgatcccgggtcgcggcacttttgcgtccttttgctgtgctcgccgcactcgtttctgcggctctgcgggtctggcacgctgcctaccatggcgtgcccatcgtgctcgctgctgccgcgctgtttctcacccgcgacgactcctactgaccggctgcagtcggtgtggctggccccgggctcaagcgagctgcgggtcaatttcgaccagcgctgtttggtgttccgacacgtctatagctacgaacacggcaccgagtgggcggcaggacgtggtagcccgggccaatgcgctcgggacggcgtcaatagtgcgtagcgacgagatacactcggcatgatcggaggtctcgttcgatgcgggatggcgtcggagcggggatcggattggccacgtaggtagaggaggggacggcggcggtgtgcgggcagcgtgtgtgggcacgggaagcgttgtgttgtgcatgcgagggcgcaaaatttgggggcaggcgggtaggtttgacttttggcgcctcgatagctcagttgggagagcgtcagactgaagatctgaaggtccctggttcgatcccgggtcgcggcacttttgcgtccttttgctgtgctcgccgcactcgtttctgcggctctgcgggtctggcacgctgcctaccatggcgtgcccatcgtgctcgctgctgccgcgctgtttctcacccgcgacgactcctactgaccggctgcagtcggtgtggctggccccgggctcaagcgagctgtgggtcaatttcgaccagcgctgtttggtgttccgacacgtctannnnnnnnnnnnnnnnnnnnnnnnnnnnnnnnnnnnnnnnnnnnnnnnnnnnnnnnnnnnnnnnnnnnnnnnnnnnnnnnnnnnnnnnnnnnnnnnnnnnnnnnnnnnnnnnnnnnnnnnnnnnnnnnnnnnnnnnnnnnnnnnnnnnnnnnnnnnnnnnnnnnnnnnnnnnnnnnnnnnnnnnnnnnnnnnnnnnnnnnnnnnnnnnnnnnnnnnnnnnnnnnnnnnnnnnnnnnnnnnnnnnnnnnnnnnnnnnnnnnnnnnnnnnnnnnnnnnnnnnnnnnnnnnnnnnnnnnnnnnnnnnnnnnnnnnnnnnnnnnnnnnnnnnnnnnnnnnnnnnnnnnnnnnnnnnnnnnnnnnnnnnnnnnnnnnnnnnnnnnnnnnnnnnnnnnnnnnnnnnnnnnnnnnnnnnnnnnnnnnnnnnnnnnnnnnnnnnnnnnnnnnnnnnnnnnnnnnnnnnnnnnnnnnnnnnnnnnnnnnnnnnnnnnnnnnnnnnnnnnnnnnnnnnnnnnnnnnnnnnnnnnnnnnnnnnnnnnnnnnnnnnnnnnnnnnnnnnnnnnnnnnnnnnnnnnnnnnnnnnnnnnnnnnnnnnnnnnnnnnnnnnnnnnnnnnnnnnnnnnnnnnnnnnnnnnnnnnnnnnnnnnnnnnnnnnnnnnnnnnnnnnnnnnnnnnnnnnnnnnnnnnnnnnnnnnnnnnnnnnnnnnnnnnnnnnnnnnnnnnnnnnnnnnnnnnnnnnnnnnnnnnnnnnnnnnnnnnnnnnnnnnnnnnnnnnnnnnnnnnnnnnnnnnnnnnnnnnnnnnnnnnnnnnnnnnnnnnnnnnnnnnnnnnnnnnnnnnnnnnnnnnnnnnnnnnnnnnnnnnnnnnnnnnnnnnnnnnnnnnnnnnnnnnnnnnnnnnnnnnnnnnnnnnnnnnnnnnnnnnnnnnnnnnnnnnnnnnnnnnnnnnnnnnnnnnnnnnnnnnnnnnnnnnnnnnnnnnnnnnnnnnnnnnnnnnnnnnnnnnnnnnnnnnnnnnnnnnnnnnnnnnnnnnnnnnnnnnnnnnnnnnnnnnnnnnnnnnnnnnnnnnnnnnnnnnnnnnnnnnnnnnnnnnnnnnnnnnnnnnnnnnnnnnnnnnnnnnnnnnnnnnnnnnnnnnnnnnnnnnnnnnnnnnnnnnnnnnnnnnnnnnnnnnnnnnnnnnnnnnnnnnnnnnnnnnnnnnnnnnnnnnnnnnnnnnnnnnnnnnnnnnnnnnnnnnnnnnnnnnnnnnnnnnnnnnnnnnnnnnnnnnnnnnnnnnnnnnnnnnnnnnnnnnnnnnnnnnnnnnnnnnnnnnnnnnnnnnnnnnnnnnnnnnnnnnnnnnnnnnnnnnnnnnnnnnnnnnnnnnnnnnnnnnnnnnnnnnnnnnnnnnnnnnnnnnnnnnnnnnnnnnnnnnnnnnnnnnnnnnnnnnnnnnnnnnnnnnnnnnnnnnnnnnnnnnnnnnnnnnnnnnnnnnnnnnnnnnnnnnnnnnnnnnnnnnnnnnnnnnnnnnnnnnnnnnnnnnnnnnnnnnnnnnnnnnnnnnnnnnnnnnnnnnnnnnnnnnnnnnnnnnnnnnnnnnnnnnnnnnnnnnnnnnnnnnnnnnnnnnnnnnnnnnnnnnnnnnnnnnnnnnnnnnnnnnnnnnnnnnnnnnnnnnnnnnnnnnnnnnnnnnnnnnnnnnnnnnnnnnnnnnnnnnnnnnnnnnnnnnnnnnnnnnnnnnnnnnnnnnnnnnnnnnnnnnnnnnnnnnnnnnnnnnnnnnnnnnnnnnnnnnnnnnnnnnnnnnnnnnnnnnnnnnnnnnnnnnnnnnnnnnnnnnnnnnnnnnnnnnnnnnnnnnnnnnnnnnnnnnnnnnnnnnnnnnnnnnnnnnnnnnnnnnnnnnnnnnnnnnnnnnnnnnnnnnnnnnnnnnnnnnnnnnnnnnnnnnnnnnnnnnnnnnnnnnnnnnnnnnnnnnnnnnnnnnnnnnnnnnnnnnnnnnnnnnnnnnnnnnnnnnnnnnnnnnnnnnnnnnnnnnnnnnnnnnnnnnnnnnnnnnnnnnnnnnnnnnnnnnnnnnnnnnnnnnnnnnnnnnnnnnnnnnnnnnnnnnnnnnnnnnnnnnnnnnnnnnnnnnnnnnnnnnnnnnnnnnnnnnnnnnnnnnnnnnnnnnnnnnnnnnnnnnnnnnnnnnnnnnnnnnnnnnnnnnnnnnnnnnnnnnnnnnnnnnnnnnnnnnnnnnnnnnnnnnnnnnnnnnnnnnnnnnnnnnnnnnnnnnnnnnnnnnnnnnnnnnnnnnnnnnnnnnnnnnnnnnnnnnnnnnnnnnnnnnnnnnnnnnnnnnnnnnnnnnnnnnnnnnnnnnnnnnnnnnnnnnnnnnnnnnnnnnnnnnnnnnnnnnnnnnnnnnnnnnnnnnnnnnnnnnnnnnnnnnnnnnnnnnnnnnnnnnnnnnnnnnnnnnnnnnnnnnnnnnnnnnnnnnnnnnnnnnnnnnnnnnnnnnnnnnnnnnnnnnnnnnnnnnnnnnnnnnnnnnnnnnnnnnnnnnnnnnnnnnnnnnnnnnnnnnnnnnnnnnnnnnnnnnnnnnnnnnnnnnnnnnnnnnnnnnnnnnnnnnnnnnnnnnnnnnnnnnnnnnnnnnnnnnnnnnnnnnnnnnnnnnnnnnnnnnnnnnnnnnnnnnnnnnnnnnnnnnnnnnnnnnnnnnnnnnnnnnnnnnnnnnnnnnnnnnnnnnnnnnnnnnnnnnnnnnnnnnnnnnnnnnnnnnnnnnnnnnnnnnnnnnnnnnnnnnnnnnnnnnnnnnnnnnnnnnnnnnnnnnnnnnnnnnnnnnnnnnnnnnnnnnnnnnnnnnnnnnnnnnnnnnnnnnnnnnnnnnnnnnnnnnnnnnnnnnnnnnnnnnnnnnnnnnnnnnnnnnnnnnnnnnnnnnnnnnnnnnnnnnnnnnnnnnnnnnnnnnnnnnnnnnnnnnnnnnnnnnnnnnnnnnnnnnnnnnnnnnnnnnnnnnnnnnnnnnnnnnnnnnnnnnnnnnnnnnnnnnnnnnnnnnnnnnnnnnnnnnnnnnnnnnnnnnnnnnnnnnnnnnnnnnnnnnnnnnnnnnnnnnnnnnnnnnnnnnnnnnnnnnnnnnnnnnnnnnnnnnnnnnnnnnnnnnnnnnnnnnnnnnnnnnnnnnnnnnnnnnnnnnnnnnnnnnnnnnnnnnnnnnnnnnnnnnnnnnnnnnnnnnnnnnnnnnnnnnnnnnnnnnnnnnnnnnnnnnnnnnnnnnnnnnnnnnnnnnnnnnnnnnnnnnnnnnnnnnnnnnnnnnnnnnnnnnnnnnnnnnnnnnnnnnnnnnnnnnnnnnnnnnnnnnnnnnnnnnnnnnnnnnnnnnnnnnnnnnnnnnnnnnnnnnnnnnnnnnnnnnnnnnnnnnnnnnnnnnnnnnnnnnnnnnnnnnnnnnnnnnnnnnnnnnnnnnnnnnnnnnnnnnnnnnnnnnnnnnnnnnnnnnnnnnnnnnnnnnnnnnnnnnnnnnnnnnnnnnnnnnnnnnnnnnnnnnnnnnnnnnnnnnnnnnnnnnnnnnnnnnnnnnnnnnnnnnnnnnnnnnnnnnnnnnnnnnnnnnnnnnnnnnnnnnnnnnnnnnnnnnnnnnnnnnnnnnnnnnnnnnnnnnnnnnnnnnnnnnnnnnnnnnnnnnnnnnnnnnnnnnnnnnnnnnnnnnnnnnnnnnnnnnnnnnnnnnnnnnnnnnnnnnnnnnnnnnnnnnnnnnnnnnnnnnnnnnnnnnnnnnnnnnnnnnnnnnnnnnnnnnnnnnnnnnnnnnnnnnnnnnnnnnnnnnnnnnnnnnnnnnnnnnnnnnnnnnnnnnnnnnnnnnnnnnnnnnnnnnnnnnnnnnnnnnnnnnnnnnnnnnnnnnnnnnnnnnnnnnnnnnnnnnnnnnnnnnnnnnnnnnnnnnnnnnnnnnnnnnnnnnnnnnnnnnnnnnnnnnnnnnnnnnnnnnnnnnnnnnnnnnnnnnnnnnnnnnnnnnnnnnnnnnnnnnnnnnnnnnnnnnnnnnnnnnnnnnnnnnnnnnnnnnnnnnnnnnnnnnnnnnnnnnnnnnnnnnnnnnnnnnnnnnnnnnnnnnnnnnnnnnnnnnnnnnnnnnnnnnnnnnnnnnnnnnnnnnnnnnnnnnnnnnnnnnnnnnnnnnnnnnnnnnnnnnnnnnnnnnnnnnnnnnnnnnnnnnnnnnnnnnnnnnnnnnnnnnnnnnnnnnnnnnnnnnnnnnnnnnnnnnnnnnnnnnnnnnnnnnnnnnnnnnnnnnnnnnnnnnnnnnnnnnnnnnnnnnnnnnnnnnnnnnnnnnnnnnnnnnnnnnnnnnnnnnnnnnnnnnnnnnnnnnnnnnnnnnnnnnnnnnnnnnnnnnnnnnnnnnnnnnnnnnnnnnnnnnnnnnnnnnnnnnnnnnnnnnnnnnnnnnnnnnnnnnnnnnnnnnnnnnnnnnnnnnnnnnnnnnnnnnnnnnnnnnnnnnnnnnnnnnnnnnnnnnnnnnnnnnnnnnnnnnnnnnnnnnnnnnnnnnnnnnnnnnnnnnnnnnnnnnnnnnnnnnnnnnnnnnnnnnnnnnnnnnnnnnnnnnnnnnnnnnnnnnnnnnnnnnnnnnnnnnnnnnnnnnnnnnnnnnnnnnnnnnnnnnnnnnnnnnnnnnnnnnnnnnnnnnnnnnnnnnnnnnnnnnnnnnnnnnnnnnnnnnnnnnnnnnnnnnnnnnnnnnnnnnnnnnnnnnnnnnnnnnnnnnnnnnnnnnnnnnnnnnnnnnnnnnnnnnnnnnnnnnnnnnnnnnnnnnnnnnnnnnnnnnnnnnnnnnnnnnnnnnnnnnnnnnnnnnnnnnnnnnnnnnnnnnnnnnnnnnnnnnnnnnnnnnnnnnnnnnnnnnnnnnnnnnnnnnnnnnnnnnnnnnnnnnnnnnnnnnnnnnnnnnnnnnnnnnnnnnnnnnnnnnnnnnnnnnnnnnnnnnnnnnnnnnnnnnnnnnnnnnnnnnnnnnnnnnnnnnnnnnnnnnnnnnnnnnnnnnnnnnnnnnnnnnnnnnnnnnnnnnnnnnnnnnnnnnnnnnnnnnnnnnnnnnnnnnnnnnnnnnnnnnnnnnnnnnnnnnnnnnnnnnnnnnnnnnnnnnnnnnnnnnnnnnnnnnnnnnnnnnnnnnnnnnnnnnnnnnnnnnnnnnnnnnnnnnnnnnnnnnnnnnnnnnnnnnnnnnnnnnnnnnnnnnnnnnnnnnnnnnnnnnnnnnnnnnnnnnnnnnnnnnnnnnnnnnnnnnnnnnnnnnnnnnnnnnnnnnnnnnnnnnnnnnnnnnnnnnnnnnnnnnnnnnnnnnnnnnnnnnnnnnnnnnnnnnnnnnnnnnnnnnnnnnnnnnnnnnnnnnnnnnnnnnnnnnnnnnnnnnnnnnnnnnnnnnnnnnnnnnnnnnnnnnnnnnnnnnnnnnnnnnnnnnnnnnnnnnnnnnnnnnnnnnnnnnnnnnnnnnnnnnnnnnnnnnnnnnnnnnnnnnnnnnnnnnnnnnnnnnnnnnnnnnnnnnnnnnnnnnnnnnnnnnnnnnnnnnnnnnnnnnnnnnnnnnnnnnnnnnnnnnnnnnnnnnnnnnnnnnnnnnnnnnnnnnnnnnnnnnnnnnnnnnnnnnnnnnnnnnnnnnnnnnnnnnnnnnnnnnnnnnnnnnnnnnnnnnnnnnnnnnnnnnnnnnnnnnnnnnnnnnnnnnnnnnnnnnnnnnnnnnnnnnnnnnnnnnnnnnnnnnnnnnnnnnnnnnnnnnnnnnnnnnnnnnnnnnnnnnnnnnnnnnnnnnnnnnnnnnnnnnnnnnnnnnnnnnnnnnnnnnnnnnnnnnnnnnnnnnnnnnnnnnnnnnnnnnnnnnnnnnnnnnnnnnnnnnnnnnnnnnnnnnnnnnnnnnnnnnnnnnnnnnnnnnnnnnnnnnnnnnnnnnnnnnnnnnnnnnnnnnnnnnnnnnnnnnnnnnnnnnnnnnnnnnnnnnnnnnnnnnnnnnnnnnnnnnnnnnnnnnnnnnnnnnnnnnnnnnnnnnnnnnnnnnnnnnnnnnnnnnnnnnnnnnnnnnnnnnnnnnnnnnnnnnnnnnnnnnnnnnnnnnnnnnnnnnnnnnnnnnnnnnnnnnnnnnnnnnnnnnnnnnnnnnnnnnnnnnnnnnnnnnnnnnnnnnnnnnnnnnnnnnnnnnnnnnnnnnnnnnnnnnnnnnnnnnnnnnnnnnnnnnnnnnnnnnnnnnnnnnnnnnnnnnnnnnnnnnnnnnnnnnnnnnnnnnnnnnnnnnnnnnnnnnnnnnnnnnnnnnnnnnnnnnnnnnnnnnnnnnnnnnnnnnnnnnnnnnnnnnnnnnnnnnnnnnnnnnnnnnnnnnnnnnnnnnnnnnnnnnnnnnnnnnnnnnnnnnnnnnnnnnnnnnnnnnnnnnnnnnnnnnnnnnnnnnnnnnnnnnnnnnnnnnnnnnnnnnnnnnnnnnnnnnnnnnnnnnnnnnnnnnnnnnnnnnnnnnnnnnnnnnnnnnnnnnnnnnnnnnnnnnnnnnnnnnnnnnnnnnnnnnnnnnnnnnnnnnnnnnnnnnnnnnnnnnnnnnnnnnnnnnnnnnnnnnnnnnnnnnnnnnnnnnnnnnnnnnnnnnnnnnnnnnnnnnnnnnnnnnnnnnnnnnnnnnnnnnnnnnnnnnnnnnnnnnnnnnnnnnnnnnnnnnnnnnnnnnnnnnnnnnnnnnnnnnnnnnnnnnnnnnnnnnnnnnnnnnnnnnnnnnnnnnnnnnnnnnnnnnnnnnnnnnnnnnnnnnnnnnnnnnnnnnnnnnnnnnnnnnnnnnnnnnnnnnnnnnnnnnnnnnnnnnnnnnnnnnnnnnnnnnnnnnnnnnnnnnnnnnnnnnnnnnnnnnnnnnnnnnnnnnnnnnnnnnnnnnnnnnnnnnnnnnnnnnnnnnnnnnnnnnnnnnnnnnnnnnnnnnnnnnnnnnnnnnnnnnnnnnnnnnnnnnnnnnnnnnnnnnnnnnnnnnnnnnnnnnnnnnnnnnnnnnnnnnnnnnnnnnnnnnnnnnnnnnnnnnnnnnnnnnnnnnnnnnnnnnnnnnnnnnnnnnnnnnnnnnnnnnnnnnnnnnnnnnnnnnnnnnnnnnnnnnnnnnnnnnnnnnnnnnnnnnnnnnnnnnnnnnnnnnnnnnnnnnnnnnnnnnnnnnnnnnnnnnnnnnnnnnnnnnnnnnnnnnnnnnnnnnnnnnnnnnnnnnnnnnnnnnnnnnnnnnnnnnnnnnnnnnnnnnnnnnnnnnnnnnnnnnnnnnnnnnnnnnnnnnnnnnnnnnnnnnnnnnnnnnnnnnnnnnnnnnnnnnnnnnnnnnnnnnnnnnnnnnnnnnnnnnnnnnnnnnnnnnnnnnnnnnnnnnnnnnnnnnnnnnnnnnnnnnnnnnnnnnnnnnnnnnnnnnnnnnnnnnnnnnnnnnnnnnnnnnnnnnnnnnnnnnnnnnnnnnnnnnnnnnnnnnnnnnnnnnnnnnnnnnnnnnnnnnnnnnnnnnnnnnnnnnnnnnnnnnnnnnnnnnnnnnnnnnnnnnnnnnnnnnnnnnnnnnnnnnnnnnnnnnnnnnnnnnnnnnnnnnnnnnnnnnnnnnnnnnnnnnnnnnnnnnnnnnnnnnnnnnnnnnnnnnnnnnnnnnnnnnnnnnnnnnnnnnnnnnnnnnnnnnnnnnnnnnnnnnnnnnnnnnnnnnnnnnnnnnnnnnnnnnnnnnnnnnnnnnnnnnnnnnnnnnnnnnnnnnnnnnnnnnnnnnnnnnnnnnnnnnnnnnnnnnnnnnnnnnnnnnnnnnnnnnnnnnnnnnnnnnnnnnnnnnnnnnnnnnnnnnnnnnnnnnnnnnnnnnnnnnnnnnnnnnnnnnnnnnnnnnnnnnnnnnnnnnnnnnnnnnnnnnnnnnnnnnnnnnnnnnnnnnnnnnnnnnnnnnnnnnnnnnnnnnnnnnnnnnnnnnnnnnnnnnnnnnnnnnnnnnnnnnnnnnnnnnnnnnnnnnnnnnnnnnnnnnnnnnnnnnnnnnnnnnnnnnnnnnnnnnnnnnnnnnnnnnnnnnnnnnnnnnnnnnnnnnnnnnnnnnnnnnnnnnnnnnnnnnnnnnnnnnnnnnnnnnnnnnnnnnnnnnnnnnnnnnnnnnnnnnnnnnnnnnnnnnnnnnnnnnnnnnnnnnnnnnnnnnnnnnnnnnnnnnnnnnnnnnnnnnnnnnnnnnnnnnnnnnnnnnnnnnnnnnnnnnnnnnnnnnnnnnnnnnnnnnnnnnnnnnnnnnnnnnnnnnnnnnnnnnnnnnnnnnnnnnnnnnnnnnnnnnnnnnnnnnnnnnnnnnnnnnnnnnnnnnnnnnnnnnnnnnnnnnnnnnnnnnnnnnnnnnnnnnnnnnnnnnnnnnnnnnnnnnnnnnnnnnnnnnnnnnnnnnnnnnnnnnnnnnnnnnnnnnnnnnnnnnnnnnnnnnnnnnnnnnnnnnnnnnnnnnnnnnnnnnnnnnnnnnnnnnnnnnnnnnnnnnnnnnnnnnnnnnnnnnnnnnnnnnnnnnnnnnnnnnnnnnnnnnnnnnnnnnnnnnnnnnnnnnnnnnnnnnnnnnnnnnnnnnnnnnnnnnnnnnnnnnnnnnnnnnnnnnnnnnnnnnnnnnnnnnnnnnnnnnnnnnnnnnnnnnnnnnnnnnnnnnnnnnnnnnnnnnnnnnnnnnnnnnnnnnnnnnnnnnnnnnnnnnnnnnnnnnnnnnnnnnnnnnnnnnnnnnnnnnnnnnnnnnnnnnnnnnnnnnnnnnnnnnnnnnnnnnnnnnnnnnnnnnnnnnnnnnnnnnnnnnnnnnnnnnnnnnnnnnnnnnnnnnnnnnnnnnnnnnnnnnnnnnnnnnnnnnnnnnnnnnnnnnnnnnnnnnnnnnnnnnnnnnnnnnnnnnnnnnnnnnnnnnnnnnnnnnnnnnnnnnnnnnnnnnnnnnnnnnnnnnnnnnnnnnnnnnnnnnnnnnnnnnnnnnnnnnnnnnnnnnnnnnnnnnnnnnnnnnnnnnnnnnnnnnnnnnnnnnnnnnnnnnnnnnnnnnnnnnnnnnnnnnnnnnnnnnnnnnnnnnnnnnnnnnnnnnnnnnnnnnnnnnnnnnnnnnnnnnnnnnnnnnnnnnnnnnnnnnnnnnnnnnnnnnnnnnnnnnnnnnnnnnnnnnnnnnnnnnnnnnnnnnnnnnnnnnnnnnnnnnnnnnnnnnnnnnnnnnnnnnnnnnnnnnnnnnnnnnnnnnnnnnnnnnnnnnnnnnnnnnnnnnnnnnnnnnnnnnnnnnnnnnnnnnnnnnnnnnnnnnnnnnnnnnnnnnnnnnnnnnnnnnnnnnnnnnnnnnnnnnnnnnnnnnnnnnnnnnnnnnnnnnnnnnnnnnnnnnnnnnnnnnnnnnnnnnnnnnnnnnnnnnnnnnnnnnnnnnnnnnnnnnnnnnnnnnnnnnnnnnnnnnnnnnnnnnnnnnnnnnnnnnnnnnnnnnnnnnnnnnnnnnnnnnnnnnnnnnnnnnnnnnnnnnnnnnnnnnnnnnnnnnnnnnnnnnnnnnnnnnnnnnnnnnnnnnnnnnnnnnnnnnnnnnnnnnnnnnnnnnnnnnnnnnnnnnnnnnnnnnnnnnnnnnnnnnnnnnnnnnnnnnnnnnnnnnnnnnnnnnnnnnnnnnnnnnnnnnnnnnnnnnnnnnnnnnnnnnnnnnnnnnnnnnnnnnnnnnnnnnnnnnnnnnnnnnnnnnnnnnnnnnnnnnnnnnnnnnnnnnnnnnnnnnnnnnnnnnnnnnnnnnnnnnnnnnnnnnnnnnnnnnnnnnnnnnnnnnnnnnnnnnnnnnnnnnnnnnnnnnnnnnnnnnnnnnnnnnnnnnnnnnnnnnnnnnnnnnnnnnnnnnnnnnnnnnnnnnnnnnnnnnnnnnnnnnnnnnnnnnnnnnnnnnnnnnnnnnnnnnnnnnnnnnnnnnnnnnnnnnnnnnnnnnnnnnnnnnnnnnnnnnnnnnnnnnnnnnnnnnnnnnnnnnnnnnnnnnnnnnnnnnnnnnnnnnnnnnnnnnnnnnnnnnnnnnnnnnnnnnnnnnnnnnnnnnnnnnnnnnnnnnnnnnnnnnnnnnnnnnnnnnnnnnnnnnnnnnnnnnnnnnnnnnnnnnnnnnnnnnnnnnnnnnnnnnnnnnnnnnnnnnnnnnnnnnnnnnnnnnnnnnnnnnnnnnnnnnnnnnnnnnnnnnnnnnnnnnnnnnnnnnnnnnnnnnnnnnnnnnnnnnnnnnnnnnnnnnnnnnnnnnnnnnnnnnnnnnnnnnnnnnnnnnnnnnnnnnnnnnnnnnnnnnnnnnnnnnnnnnnnnnnnnnnnnnnnnnnnnnnnnnnnnnnnnnnnnnnnnnnnnnnnnnnnnnnnnnnnnnnnnnnnnnnnnnnnnnnnnnnnnnnnnnnnnnnnnnnnnnnnnnnnnnnnnnnnnnnnnnnnnnnnnnnnnnnnnnnnnnnnnnnnnnnnnnnnnnnnnnnnnnnnnnnnnnnnnnnnnnnnnnnnnnnnnnnnnnnnnnnnnnnnnnnnnnnnnnnnnnnnnnnnnnnnnnnnnnnnnnnnnnnnnnnnnnnnnnnnnnnnnnnnnnnnnnnnnnnnnnnnnnnnnnnnnnnnnnnnnnnnnnnnnnnnnnnnnnnnnnnnnnnnnnnnnnnnnnnnnnnnnnnnnnnnnnnnnnnnnnnnnnnnnnnnnnnnnnnnnnnnnnnnnnnnnnnnnnnnnnnnnnnnnnnnnnnnnnnnnnnnnnnnnnnnnnnnnnnnnnnnnnnnnnnnnnnnnnnnnnnnnnnnnnnnnnnnnnnnnnnnnnnnnnnnnnnnnnnnnnnnnnnnnnnnnnnnnnnnnnnnnnnnnnnnnnnnnnnnnnnnnnnnnnnnnnnnnnnnnnnnnnnnnnnnnnnnnnnnnnnnnnnnnnnnnnnnnnnnnnnnnnnnnnnnnnnnnnnnnnnnnnnnnnnnnnnnnnnnnnnnnnnnnnnnnnnnnnnnnnnnnnnnnnnnnnnnnnnnnnnnnnnnnnnnnnnnnnnnnnnnnnnnnnnnnnnnnnnnnnnnnnnnnnnnnnnnnnnnnnnnnnnnnnnnnnnnnnnnnnnnnnnnnnnnnnnnnnnnnnnnnnnnnnnnnnnnnnnnnnnnnnnnnnnnnnnnnnnnnnnnnnnnnnnnnnnnnnnnnnnnnnnnnnnnnnnnnnnnnnnnnnnnnnnnnnnnnnnnnnnnnnnnnnnnnnnnnnnnnnnnnnnnnnnnnnnnnnnnnnnnnnnnnnnnnnnnnnnnnnnnnnnnnnnnnnnnnnnnnnnnnnnnnnnnnnnnnnnnnnnnnnnnnnnnnnnnnnnnnnnnnnnnnnnnnnnnnnnnnnnnnnnnnnnnnnnnnnnnnnnnnnnnnnnnnnnnnnnnnnnnnnnnnnnnnnnnnnnnnnnnnnnnnnnnnnnnnnnnnnnnnnnnnnnnnnnnnnnnnnnnnnnnnnnnnnnnnnnnnnnnnnnnnnnnnnnnnnnnnnnnnnnnnnnnnnnnnnnnnnnnnnnnnnnnnnnnnnnnnnnnnnnnnnnnnnnnnnnnnnnnnnnnnnnnnnnnnnnnnnnnnnnnnnnnnnnnnnnnnnnnnnnnnnnnnnnnnnnnnnnnnnnnnnnnnnnnnnnnnnnnnnnnnnnnnnnnnnnnnnnnnnnnnnnnnnnnnnnnnnnnnnnnnnnnnnnnnnnnnnnnnnnnnnnnnnnnnnnnnnnnnnnnnnnnnnnnnnnnnnnnnnnnnnnnnnnnnnnnnnnnnnnnnnnnnnnnnnnnnnnnnnnnnnnnnnnnnnnnnnnnnnnnnnnnnnnnnnnnnnnnnnnnnnnnnnnnnnnnnnnnnnnnnnnnnnnnnnnnnnnnnnnnnnnnnnnnnnnnnnnnnnnnnnnnnnnnnnnnnnnnnnnnnnnnnnnnnnnnnnnnnnnnnnnnnnnnnnnnnnnnnnnnnnnnnnnnnnnnnnnnnnnnnnnnnnnnnnnnnnnnnnnnnnnnnnnnnnnnnnnnnnnnnnnnnnnnnnnnnnnnnnnnnnnnnnnnnnnnnnnnnnnnnnnnnnnnnnnnnnnnnnnnnnnnnnnnnnnnnnnnnnnnnnnnnnnnnnnnnnnnnnnnnnnnnnnnnnnnnnnnnnnnnnnnnnnnnnnnnnnnnnnnnnnnnnnnnnnnnnnnnnnnnnnnnnnnnnnnnnnnnnnnnnnnnnnnnnnnnnnnnnnnnnnnnnnnnnnnnnnnnnnnnnnnnnnnnnnnnnnnnnnnnnnnnnnnnnnnnnnnnnnnnnnnnnnnnnnnnnnnnnnnnnnnnnnnnnnnnnnnnnnnnnnnnnnnnnnnnnnnnnnnnnnnnnnnnnnnnnnnnnnnnnnnnnnnnnnnnnnnnnnnnnnnnnnnnnnnnnnnnnnnnnnnnnnnnnnnnnnnnnnnnnnnnnnnnnnnnnnnnnnnnnnnnnnnnnnnnnnnnnnnnnnnnnnnnnnnnnnnnnnnnnnnnnnnnnnnnnnnnnnnnnnnnnnnnnnnnnnnnnnnnnnnnnnnnnnnnnnnnnnnnnnnnnnnnnnnnnnnnnnnnnnnnnnnnnnnnnnnnnnnnnnnnnnnnnnnnnnnnnnnnnnnnnnnnnnnnnnnnnnnnnnnnnnnnnnnnnnnnnnnnnnnnnnnnnnnnnnnnnnnnnnnnnnnnnnnnnnnnnnnnnnnnnnnnnnnnnnnnnnnnnnnnnnnnnnnnnnnnnnnnnnnnnnnnnnnnnnnnnnnnnnnnnnnnnnnnnnnnnnnnnnnnnnnnnnnnnnnnnnnnnnnnnnnnnnnnnnnnnnnnnnnnnnnnnnnnnnnnnnnnnnnnnnnnnnnnnnnnnnnnnnnnnnnnnnnnnnnnnnnnnnnnnnnnnnnnnnnnnnnnnnnnnnnnnnnnnnnnnnnnnnnnnnnnnnnnnnnnnnnnnnnnnnnnnnnnnnnnnnnnnnnnnnnnnnnnnnnnnnnnnnnnnnnnnnnnnnnnnnnnnnnnnnnnnnnnnnnnnnnnnnnnnnnnnnnnnnnnnnnnnnnnnnnnnnnnnnnnnnnnnnnnnnnnnnnnnnnnnnnnnnnnnnnnnnnnnnnnnnnnnnnnnnnnnnnnnnnnnnnnnnnnnnnnnnnnnnnnnnnnnnnnnnnnnnnnnnnnnnnnnnnnnnnnnnnnnnnnnnnnnnnnnnnnnnnnnnnnnnnnnnnnnnnnnnnnnnnnnnnnnnnnnnnnnnnnnnnnnnnnnnnnnnnnnnnnnnnnnnnnnnnnnnnnnnnnnnnnnnnnnnnnnnnnnnnnnnnnnnnnnnnnnnnnnnnnnnnnnnnnnnnnnnnnnnnnnnnnnnnnnnnnnnnnnnnnnnnnnnnnnnnnnnnnnnnnnnnnnnnnnnnnnnnnnnnnnnnnnnnnnnnnnnnnnnnnnnnnnnnnnnnnnnnnnnnnnnnnnnnnnnnnnnnnnnnnnnnnnnnnnnnnnnnnnnnnnnnnnnnnnnnnnnnnnnnnnnnnnnnnnnnnnnnnnnnnnnnnnnnnnnnnnnnnnnnnnnnnnnnnnnnnnnnnnnnnnnnnnnnnnnnnnnnnnnnnnnnnnnnnnnnnnnnnnnnnnnnnnnnnnnnnnnnnnnnnnnnnnnnnnnnnnnnnnnnnnnnnnnnnnnnnnnnnnnnnnnnnnnnnnnnnnnnnnnnnnnnnnnnnnnnnnnnnnnnnnnnnnnnnnnnnnnnnnnnnnnnnnnnnnnnnnnnnnnnnnnnnnnnnnnnnnnnnnnnnnnnnnnnnnnnnnnnnnnnnnnnnnnnnnnnnnnnnnnnnnnnnnnnnnnnnnnnnnnnnnnnnnnnnnnnnnnnnnnnnnnnnnnnnnnnnnnnnnnnnnnnnnnnnnnnnnnnnnnnnnnnnnnnnnnnnnnnnnnnnnnnnnnnnnnnnnnnnnnnnnnnnnnnnnnnnnnnnnnnnnnnnnnnnnnnnnnnnnnnnnnnnnnnnnnnnnnnnnnnnnnnnnnnnnnnnnnnnnnnnnnnnnnnnnnnnnnnnnnnnnnnnnnnnnnnnnnnnnnnnnnnnnnnnnnnnnnnnnnnnnnnnnnnnnnnnnnnnnnnnnnnnnnnnnnnnnnnnnnnnnnnnnnnnnnnnnnnnnnnnnnnnnnnnnnnnnnnnnnnnnnnnnnnnnnnnnnnnnnnnnnnnnnnnnnnnnnnnnnnnnnnnnnnnnnnnnnnnnnnnnnnnnnnnnnnnnnnnnnnnnnnnnnnnnnnnnnnnnnnnnnnnnnnnnnnnnnnnnnnnnnnnnnnnnnnnnnnnnnnnnnnnnnnnnnnnnnnnnnnnnnnnnnnnnnnnnnnnnnnnnnnnnnnnnnnnnnnnnnnnnnnnnnnnnnnnnnnnnnnnnnnnnnnnnnnnnnnnnnnnnnnnnnnnnnnnnnnnnnnnnnnnnnnnnnnnnnnnnnnnnnnnnnnnnnnnnnnnnnnnnnnnnnnnnnnnnnnnnnnnnnnnnnnnnnnnnnnnnnnnnnnnnnnnnnnnnnnnnnnnnnnnnnnnnnnnnnnnnnnnnnnnnnnnnnnnnnnnnnnnnnnnnnnnnnnnnnnnnnnnnnnnnnnnnnnnnnnnnnnnnnnnnnnnnnnnnnnnnnnnnnnnnnnnnnnnnnnnnnnnnnnnnnnnnnnnnnnnnnnnnnnnnnnnnnnnnnnnnnnnnnnnnnnnnnnnnnnnnnnnnnnnnnnnnnnnnnnnnnnnnnnnnnnnnnnnnnnnnnnnnnnnnnnnnnnnnnnnnnnnnnnnnnnnnnnnnnnnnnnnnnnnnnnnnnnnnnnnnnnnnnnnnnnnnnnnnnnnnnnnnnnnnnnnnnnnnnnnnnnnnnnnnnnnnnnnnnnnnnnnnnnnnnnnnnnnnnnnnnnnnnnnnnnnnnnnnnnnnnnnnnnnnnnnnnnnnnnnnnnnnnnnnnnnnnnnnnnnnnnnnnnnnnnnnnnnnnnnnnnnnnnnnnnnnnnnnnnnnnnnnnnnnnnnnnnnnnnnnnnnnnnnnnnnnnnnnnnnnnnnnnnnnnnnnnnnnnnnnnnnnnnnnnnnnnnnnnnnnnnnnnnnnnnnnnnnnnnnnnnnnnnnnnnnnnnnnnnnnnnnnnnnnnnnnnnnnnnnnnnnnnnnnnnnnnnnnnnnnnnnnnnnnnnnnnnnnnnnnnnnnnnnnnnnnnnnnnnnnnnnnnnnnnnnnnnnnnnnnnnnnnnnnnnnnnnnnnnnnnnnnnnnnnnnnnnnnnnnnnnnnnnnnnnnnnnnnnnnnnnnnnnnnnnnnnnnnnnnnnnnnnnnnnnnnnnnnnnnnnnnnnnnnnnnnnnnnnnnnnnnnnnnnnnnnnnnnnnnnnnnnnnnnnnnnnnnnnnnnnnnnnnnnnnnnnnnnnnnnnnnnnnnnnnnnnnnnnnnnnnnnnnnnnnnnnnnnnnnnnnnnnnnnnnnnnnnnnnnnnnnnnnnnnnnnnnnnnnnnnnnnnnnnnnnnnnnnnnnnnnnnnnnnnnnnnnnnnnnnnnnnnnnnnnnnnnnnnnnnnnnnnnnnnnnnnnnnnnnnnnnnnnnnnnnnnnnnnnnnnnnnnnnnnnnnnnnnnnnnnnnnnnnnnnnnnnnnnnnnnnnnnnnnnnnnnnnnnnnnnnnnnnnnnnnnnnnnnnnnnnnnnnnnnnnnnnnnnnnnnnnnnnnnnnnnnnnnnnnnnnnnnnnnnnnnnnnnnnnnnnnnnnnnnnnnnnnnnnnnnnnnnnnnnnnnnnnnnnnnnnnnnnnnnnnnnnnnnnnnnnnnnnnnnnnnnnnnnnnnnnnnnnnnnnnnnnnnnnnnnnnnnnnnnnnnnnnnnnnnnnnnnnnnnnnnnnnnnnnnnnnnnnnnnnnnnnnnnnnnnnnnnnnnnnnnnnnnnnnnnnnnnnnnnnnnnnnnnnnnnnnnnnnnnnnnnnnnnnnnnnnnnnnnnnnnnnnnnnnnnnnnnnnnnnnnnnnnnnnnnnnnnnnnnnnnnnnnnnnnnnnnnnnnnnnnnnnnnnnnnnnnnnnnnnnnnnnnnnnnnnnnnnnnnnnnnnnnnnnnnnnnnnnnnnnnnnnnnnnnnnnnnnnnnnnnnnnnnnnnnnnnnnnnnnnnnnnnnnnnnnnnnnnnnnnnnnnnnnnnnnnnnnnnnnnnnnnnnnnnnnnnnnnnnnnnnnnnnnnnnnnnnnnnnnnnnnnnnnnnnnnnnnnnnnnnnnnnnnnnnnnnnnnnnnnnnnnnnnnnnnnnnnnnnnnnnnnnnnnnnnnnnnnnnnnnnnnnnnnnnnnnnnnnnnnnnnnnnnnnnnnnnnnnnnnnnnnnnnnnnnnnnnnnnnnnnnnnnnnnnnnnnnnnnnnnnnnnnnnnnnnnnnnnnnnnnnnnnnnnnnnnnnnnnnnnnnnnnnnnnnnnnnnnnnnnnnnnnnnnnnnnnnnnnnnnnnnnnnnnnnnnnnnnnnnnnnnnnnnnnnnnnnnnnnnnnnnnnnnnnnnnnnnnnnnnnnnnnnnnnnnnnnnnnnnnnnnnnnnnnnnnnnnnnnnnnnnnnnnnnnnnnnnnnnnnnnnnnnnnnnnnnnnnnnnnnnnnnnnnnnnnnnnnnnnnnnnnnnnnnnnnnnnnnnnnnnnnnnnnnnnnnnnnnnnnnnnnnnnnnnnnnnnnnnnnnnnnnnnnnnnnnnnnnnnnnnnnnnnnnnnnnnnnnnnnnnnnnnnnnnnnnnnnnnnnnnnnnnnnnnnnnnnnnnnnnnnnnnnnnnnnnnnnnnnnnnnnnnnnnnnnnnnnnnnnnnnnnnnnnnnnnnnnnnnnnnnnnnnnnnnnnnnnnnnnnnnnnnnnnnnnnnnnnnnnnnnnnnnnnnnnnnnnnnnnnnnnnnnnnnnnnnnnnnnnnnnnnnnnnnnnnnnnnnnnnnnnnnnnnnnnnnnnnnnnnnnnnnnnnnnnnnnnnnnnnnnnnnnnnnnnnnnnnnnnnnnnnnnnnnnnnnnnnnnnnnnnnnnnnnnnnnnnnnnnnnnnnnnnnnnnnnnnnnnnnnnnnnnnnnnnnnnnnnnnnnnnnnnnnnnnnnnnnnnnnnnnnnnnnnnnnnnnnnnnnnnnnnnnnnnnnnnnnnnnnnnnnnnnnnnnnnnnnnnnnnnnnnnnnnnnnnnnnnnnnnnnnnnnnnnnnnnnnnnnnnnnnnnnnnnnnnnnnnnnnnnnnnnnnnnnnnnnnnnnnnnnnnnnnnnnnnnnnnnnnnnnnnnnnnnnnnnnnnnnnnnnnnnnnnnnnnnnnnnnnnnnnnnnnnnnnnnnnnnnnnnnnnnnnnnnnnnnnnnnnnnnnnnnnnnnnnnnnnnnnnnnnnnnnnnnnnnnnnnnnnnnnnnnnnnnnnnnnnnnnnnnnnnnnnnnnnnnnnnnnnnnnnnnnnnnnnnnnnnnnnnnnnnnnnnnnnnnnnnnnnnnnnnnnnnnnnnnnnnnnnnnnnnnnnnnnnnnnnnnnnnnnnnnnnnnnnnnnnnnnnnnnnnnnnnnnnnnnnnnnnnnnnnnnnnnnnnnnnnnnnnnnnnnnnnnnnnnnnnnnnnnnnnnnnnnnnnnnnnnnnnnnnnnnnnnnnnnnnnnnnnnnnnnnnnnnnnnnnnnnnnnnnnnnnnnnnnnnnnnnnnnnnnnnnnnnnnnnnnnnnnnnnnnnnnnnnnnnnnnnnnnnnnnnnnnnnnnnnnnnnnnnnnnnnnnnnnnnnnnnnnnnnnnnnnnnnnnnnnnnnnnnnnnnnnnnnnnnnnnnnnnnnnnnnnnnnnnnnnnnnnnnnnnnnnnnnnnnnnnnnnnnnnnnnnnnnnnnnnnnnnnnnnnnnnnnnnnnnnnnnnnnnnnnnnnnnnnnnnnnnnnnnnnnnnnnnnnnnnnnnnnnnnnnnnnnnnnnnnnnnnnnnnnnnnnnnnnnnnnnnnnnnnnnnnnnnnnnnnnnnnnnnnnnnnnnnnnnnnnngcgggtaggtttgatttttggcgcctcgatagctcagttgggagagcgtcagactgaagatctgaaggtccctggttcgatcccgggtcgcggcacttttgcgtccttttgctgtgctcgccgcactcgtttctgcggctctgcgggtctggcacgctgcctaccatggcgtgcccatcgtgctcgctgctgccgcgctgtttctcacccgcgacgactcctactgaccggctgcagtcggtgtggctggccccgggctcaagcgagctgcgggtcaatttcgaccagcgctgtttggtgttccgacacgtgtatagctacgaacacggcaccgagtgggcggcaggacgtggtagcccgggccaatgcgctcgggacggcgtcaatagtgcgtagcgacgagatacactcggcatgatcggaggtctcgttcgatgcgggatggcgtcggagcggggatcggattggccacgtaggtagaggaggggacggcggcggtgtgcgggcagcgtgtgtgggcacgggaagcgttgtgttgtgcatgcgagggcgcaaaatttgggggcaggcgggtaggtttgatttttggcgcctcgatagctcagttgggagagcgtcagactgaagatctgaaggtccctggttcgatcccgggtcgcggcacttttgcgtccttttgctgtgctcgccgcactcgtttctgcggctctgcgggtctggcacgctgcctaccatggcgtgcccatcgtgctcgctgctgccgcgctgtttctcacccgcgacgactcctactgaccggctgcagtcggtgtggctggccccgggctcaagcgagctgtgggtcaatttcgaccagcgctgtttggtgttccgacacgtctatagctacgaacacggcaccgagtgggcggcaggacgtggtagcccgggccaatgcgctcgggacggcgtcaatagtgcgtagcgacgagatacactcggcatgatcggaggtctcgttcgatgcgggatggcgtcggagcggggatcggattggccacgtaggtagaggaggggacggcggcggtgtgcgggcagcgtgtgtgggcacgggaagcgttgtgttgtgcatgcgagggcgcaaaattttggggcaggcgggtaggtttgacttttggcgcctcgatagctcagttgggagagcgtcactgaagatctgaaggtccctggttcgatcccgggtcgcggcacttttgcgtccttttgctgtgctcgccgcactcgtttctgcggctctgcgggtctgacacgctgcctaccatggcgtgcccatcgtgctcgctgctgccgcgctgtttctcacccgcgacgattcctactgaccggctgcagtcggtgtggctggccccgggctcaagcgagctgcgggtcaatttcgaccagcgctgtttggtgttccgacacgtctatagctacgaacacggcaccgagtgggcggcaggacgtggtagcccgggccaatgcgctcgggacggcgtcaatagtgcgtagcgacgagatacactcggcatgatcggaggtctcgttcgatgcgggatggcgtcggagcggggatcggattggccacgtaggtagaggaggggacggcggtggtgtgcgggcagcgtgtgtgggcacgggaagcgttgtgttgtgcatgcgagggcgcaaaatttgggggcaggcgggtaggtttgacttttggcgcctcgatagctcagttgggagagcgtcagactgaagatctgaaggtccctggttcgatcccgggtcgcggcacttttgcgtccttttgctgtgctcgccgcactcgtttctgcggctctgcgggtctgacacgctgcctaccatggcgtgcccatcgtgctcgctgctgccgcgctgtttctcacccgcgacgattcctactgaccggctgcagtcggtgtggctggccccgggctcaagcgagctgcgggtcaatttcgaccagcgctgtttggtgttccgacacgtctatagctacgaacacggcaccgagtgggcggcaggacgtggtagcccgggccaatgcgctcgggacggcgtcaatagtgcgtagcgacgagatacactcggcatgatcggaggtctcgttcgatgcgggatggcgtcggagcggggatcggattggccacgtaggtagaggaggggacggcggcggtgtgcgggcagcgtgtgtgggcacgggaagcgttgtgttgtgcatgcgagggcgcaaaattttggggcaggcgggtaggtttgatttttggcgcctcgatagctcagttgggagagcgtcagactgaagatctgaaggtccctggttcgatcccgggtcgcggcacttttgcgtccttttgctgtgctcgccgcactcgtttctgcgcctctgcgggtctgacacgctgcctaccatggcgtgcccatcgtgctcgctgctgtcgcgctgtttctcacccgtgacgactcctactgaccggctgcagtcggtgtggctggccccgggctcaagcgagctgcgggtcaatttcgaccagcgctgtttggtgttccgacacgtctatagctacgaacacggcaccgagtgggcggcaggacgtggtagcccgggccaatgcgctcgggacggcgtcaatagtgcgtagcgacgagatacactcggcatgatcggaggtctcgttcgatgcgggatggcgtcggagcggggatcggattggccacgtaggtagaggaggggacggcggcggtgtgcgggcagcgtgtgtgggcacgggaagcgttgtgttgtgcatgcgagggcgcaaaattttggggcaggcgggtaggtttgacttttggcgcctcgatagctcagttgggagagcgtcagactgaagatctgaaggtccctggttcgatcccgggtcgcggcacttttgcgtccttttgctgtgctcgccgcactcgtttctgcggctctgcgggtctgacacgctgcctaccatggcgtgcccatcgtgctcgctgctgtcgcgctgtttctcacccgtgacgactcctactgaccggctgcagtcggtgtggctggccccgggctcaagcgagctgcgggtcaatttcgaccagcgctgtttggtgttccgacacgtctatagctacgaacacggcaccgagtgggcggcaggacgtggtagcccgggccaatgcgctcgggacggcgtcaatagtgcgtagcgacgagatacactcggcatgatcggaggtctcgttcgatgcgggatggcgtcggagcggggatcggattggccacgtaggtagaggaggggacggcggcggtgtgcgggcagcgtgtgtgggcacgggaagcgttgtgttgtgcatgcgagggcgcaaaattttggggcaggcgggtaggtttgatttttggcgcctcgatagctcagttgggagagcgtcagactgaagatctgaaggtccctggttcgatcccgggtcgcggcacttttgcgtccttttgctgtgctcgccgcactcgtttctgcggctctgcgggtctggcacgctgcctaccatggcgtgcccatcgtgctcgctgctgtcgcgctgtttctcacccgcgacgattcctactgaccggctgcagtcggtgtggctggccccgggctcaagcgagctgcgggtcaatttcgaccagcgctgtttggtgttccgacacgtgtatagctacgaacacggcaccgagtgggcggcaggacgtggtagcccgggccaatgcgctcgggacggcgtcaatagtgcgtagcgacgagatacactcggcatgatcggaggtctcgttcgatgcgggatggcgtcggagcggggatcggattggccacgtaggtagaggaggggacggcggcggtgtgcgggcagcgtgtgtgggcacgggaagcgttgtgttgtgcatgcgagggcgcaaaattttggggcaggcgggtaggtttgacttttggcgcctcgatagctcagttgggagagcgtcagactgaagatctgaaggtccctggttcgatcccgggtcgcggcacttttgcgtccttttgctgtgctcgccgcactcgtttctgcggctctgcgggtctgacacgctgcctaccatggcgtgcccatcgtgctcgctgctgccgcgctgtttctcacccgcgacgactcctactgaccggctgcagtcggtgtggctggccccgggctcaagcgagctgcgggtcaatttcgaccagcgctgtttggtgttccgacacgtgtatagctacgaacacggcaccgagtgggcggcaggacgtggtagcccgggccaatgcgctcgggacggcgtcaatagtgcgtagcgacgagatacactcggcatgatcggaggtctcgttcgatgcgggatggcgtcggagcggggatcggattggccacgtaggtagaggaggggacggcggcggtgtgcgggcagcgtgtgtgggcacgggaagcgttgtgttgtgcatgcgagggcgcaaaatttgggggcaggcgggtaggtttgatttttggcgcctcgatagctcagttgggagagcgtcagactgaagatctgaaggtccctggttcgatcccgggtcgcggcacttttgcgtccttttgctgtgctcgccgcactcgtttctgcggctctgcgggtctggcacgctgcctaccatggcgtgcccatcgtgctcgctgctgccgcgctgtttctcacccgcgacgactcctactgaccggctgcagtcggtgtggctggccccgggctcaagcgagctgtgggtcaatttcgaccagcgctgtttggtgttccgacacgtgtatagctacgaacacggcaccgagtgggcggcaggacgtggtagcccgggccaatgcgctcgggacggcgtcaatagtgcgtagcgacgagatacactcggcatgatcggaggtctcgttcgatgcgggatggcgtcggagcggggatcggattggccacgtaggtagaggaggggacggcggcggtgtgcgggcagcgtgtgtgggcacgggaagcgttgtgttgtgcatgcgagggcgcaaaattttggggcaggcgggtaggtttgacttttggcgcctcgatagctcagttgggagagcgtcactgaagatctgaaggtccctggttcgatcccgggtcgcggcacttttgcgtccttttgctgtgctcgccgcactcgtttctgcggctctgcggtgtctggcacgctgcctaccatggcgtgcccatcgtgctcgctgctgccgcgctgtttctcacccgcgacgactcctactgaccggctgcagtcggtgtggctggccccgggctcaagcgagctgcgggtcaatttcgaccagcgctgtttggtgttccgacacgtctatagctacgaacacggcaccgagtgggcggcaggacgtggtagcccgggccaatgcgctcgggacggcgtcaatagtgcgtagcgacgagatacactcggcatgatcggaggtctcgttcgatgcgggatggcgtcggagcggggatcggattggccacgtaggtagaggaggggacggcggcggtgtgcgggcagcgtgtgtgggcacgggaagcgttgtgttgtgcatgcgagggcgcaaaattttggggcaggcgggtaggtttgacttttggcgcctcgatagctcagttgggagagcgtcactgaagatctgaaggtccctggttcgatcccgggtcgcggcacttttgcgtccttttgctgtgctcgccgcactcgtttctgcggctctgcggtgtctggcacgctgcctaccatggcgtgcccatcgtgctcgctgctgccgcgctgtttctcacccgcgacgactcctactgaccggctgcagtcggtgtggctggccccgggctcaagcgagctgcgggtcaatttcgaccagcgctgtttggtgttccgacacgtctatagctacgaacacggcaccgagtgggcggcaggacgtggtagcccgggccaatgcgctcgggacggcgtcaatagtgcgtagcgacgagatacactcggcatgatcggaggtctcgttcgatgcgggatggcgtcggagcggggatcggattggccacgtaggtagaggaggggacggcggcggtgtgcgggcagcgtgtgtgggcacgggaagcgttgtgttgtgcatgcgagggcgcaaaattttggggcaggcgggtaggtttgacttttggcgcctcgatagctcagttgggagagcgtcagactgaagatctgaaggtccctggttcgatcccgggtcgcggcacttttgcgtccttttgctgtgctcgccgcactcgtttctgcggctctgcgggtctggcacgctgcctaccatggcgtgcccatcgtgctcgctgctgccgcgctgtttctcacccgtgacgactcctactgaccggctgcagtcagtgtggctggccccgggctcaagcgagctgcgggtcaatttcgaccagcgctgtttggtgttccgacacgtctatagctacgaacacggcaccgagtgggcggcaggacgtggtagcccgggccaatgcgctcgggacggcgtcaatagtgcgtagcgacgagatacactcggcatgatcggaggtctcgttcgatgcgggatggcgtcggagcggggatcggattggccacgtaggtagaggaggggacggcggcggtgtgcgggcagcgtgtgtgggcacgggaagcgttgtgttgtgcatgcgagggcgcaaaattttggggcaggcgggtaggtttgacttttggcgcctcgatagctcagttgggagagcgtcactgaagatctgaaggtccctggttcgatcccgggtcgcggcacttttgcgtccttttgctgtgctcgccgcactcgtttctgcggctctgcgggtctgacacgctgcctaccatggcgtgcccatcgtgctcgctgctgtcgcgctgtttctcacccgcgacgactcctactgaccggctgcagtcagtgtggctggccccgggctcaagcgagctgcgggtcaatttcgaccagcgctgtttggtgttccgacacgtctatagctacgaacacggcaccgagtgggcggcaggacgtggtagcccgggccaatgcgctcgggacggcgtcaatagtgcgtagcgacgagatacactcggcatgatcggaggtctcgttcgatgcgggatggcgtcggagcggggatcggattggccacgtaggtagaggaggggacggcggcggtgtgcgggcagcgtgtgtgggcacgggaagcgttgtgttgtgcatgcgagggcgcaaaattttggggcaggcgggtaggtttgatttttggcgcctcgatagctcagttgggagagcgtcagactgaagatctgaaggtccctggttcgatcccgggtcgcggcacttttgcgtccttttgctgtgctcgccgcactcgtttctgcggctctgcgggtctggcacgctgcctaccatggcgtgcccatcgtgctcgctgctgccgcgctgtttctcacccgcgacgactcctactgaccggctgcagtcggtgtggctggccccgggctcaagcgagctgcgggtcaatttcgaccagcgctgtttggtgttccgacacgtctatagctacgaacacggcaccgagtgggcggcaggacgtggtagcccgggccaatgcgctcgggacggcgtcaatagtgcgtagcgacgagatacactcggcatgatcggaggtctcgttcgatgcgggatggcgtcggagcggggatcggattggccacgtaggtagaggaggggacggcggcggtgtgcgggcagcgtgtgtgggcacgggaagcgttgtgttgtgcatgcgagggcgcaaaattttggggcaggcgggtaggtttgacttttggcgcctcgatagctcagttgggagagcgtcagactgaagatctgaaggtccctggttcgatcccgggtcgcggcacttttgcgtccttttgctgtgctcgccgcactcgtttctgcggctctgcgggtctggcacgctgcctaccatggcgtgcccatcgtgctcgctgctgccgcgctgtttctcacccgcgacgactcctactgaccggctgcagtcggtgtggctggccccgggctcaagcgagctgcgggtcaatttcgaccagcgctgtttggtgttccgacacgtgtatagctacgaacacggcaccgagtgggcggcaggacgtggtagcccgggccaatgcgctcgggacggcgtcaatagtgcgtagcgacgagatacactcggcatgatcggaggtctcgttcgatgcgggatggcgtcggagcggggatcggattggccacgtaggtagaggaggggacggcggcggtgtgcgggcagcgtgtgtgggcacgggaagcgttgtgttgtgcatgcgagggcgcaaaattttggggcaggcgggtaggtttgacttttggcgcctcgatagctcagttgggagagcgtcagactgaagatctgaaggtccctggttcgatcccgggtcgcggcacttttgcgtccttttgctgtgctcgccgcactcgtttctgcggctctgcgggtctggcacgctgcctaccatggcgtgcccatcgtgctcgctgctgccgcgctgtttctcacccgcgacgactcctactgaccggctgcagtcggtgtggctggccccgggctcaagcgagctgcgggtcaatttcgaccagcgctgtttggtgttccgacacgtgtatagctacgaacacggcaccgagtgggcggcaggacgtggtagcccgggccaatgcgctcgggacggcgtcaatagtgcgtagcgacgagatacactcggcatgatcggaggtctcgttcgatgcgggatggcgtcggagcggggatcggattggccacgtaggtagaggaggggacggcggcggtgtgcgggcagcgtgtgtgggcacgggaagcgttgtgttgtgcatgcgagggcgcaaaattttggggcaggcgggtaggtttgacttttggcgcctcgatagctcagttgggagagcgtcagactgaagatctgaaggtccctggttcgatcccgggtcgcggcacttttgcgtccttttgctgtgctagccgcactcgtttctgcggctctgcgggtctggcacgctgcctaccatggcgtgcccatcgtgctcgctgctaccatgctgtttctcacccgcgacgatccctactgactatctcaggttttacggataggacacacaatcttaggcacaattagcggtaaataaacgttaatcggctttaattctgcctggatctatagctcacacacacggtacggattgcataccggggtacacctgaaaaactctagatatatnnnnnnnnnnnnnnnnnnnnnnnnnnnnnnnnnnnnnnnnnnnnnnnnnnnnnnnnnnnnnnnnnnnnnnnnnnnnnnnnnnnnnnnnnnnnnnnnnnnnnnnnnnnnnnnnnnnnnnnnnnnnnnnnnnnnnnnnnnnnnnnnnnnnnnnnnnnnnnnnnnnnnnnnnnnnnnnnnnnnnnnnnnnnnnnnnnnnnnnnnnnnnnnnnnnnnnnnnnnnnnnnnnnnnnnnnnnnnnnnnnnnnnnnnnnnnnnnnnnnnnnnnnnnnnnnnnnnnnnnnnnnnnnnnnnnnnnnnnnnnnnnnnnnnnnnnnnnnnnnnnnnnnnnnnnnnnnnnnnnnnnnnnnnnnnnnnnnnnnnnnnnnnnnnnnnnnnnnnnnnnnnnnnnnnnnnnnnnnnnnnnnnnnnnnnnnnnnnnnnnnnnnnnnnnnnnnnnnnnnnnnnnnnnnnnnnnnnnnnnnnnnnnnnnnnnnnnnnnnnnnnnnnnnnnnnnnnnnnnnnnnnnnnnnnnnnnnnnnnnnnnnnnnnnnnnnnnnnnnnnnnnnnnnnnnnnnnnnnnnnnnnnnnnnnnnnnnnnnnnnnnnnnnnnnnnnnnnnnnnnnnnnnnnnnnnnnnnnnnnnnnnnnnnnnnnnnnnnnnnnnnnnnnnnnnnnnnnnnnnnnnnnnnnnnnnnnnnnnnnnnnnnnnnnnnnnnnnnnnnnnnnnnnnnnnnnnnnnnnnnnnnnnnnnnnnnnnnnnnnnnnnnnnnnnnnnnnnnnnnnnnnnnnnnnnnnnnnnnnnnnnnnnnnnnnnnnnnnnnnnnnnnnnnnnnnnnnnnnnnnnnnnnnnnnnnnnnnnnnnnnnnnnnnnnnnnnnnnnnnnnnnnnnnnnnnnnnnnnnnnnnnnnnnnnnnnnnnnnnnnnnnnnnnnnnnnnnnnnnnnnnnnnnnnnnnnnnnnnnnnnnnnnnnnnnnnnnnnnnnnnnnnnnnnnnnnnnnnnnnnnnnnnnnnnnnnnnnnnnnnnnnnnnnnnnnnnnnnnnnnnnnnnnnnnnnnnnnnnnnnnnnnnnnnnnnnnnnnnnnnnnnnnnnnnnnnnnnnnnnnnnnnnnnnnnnnnnnnnnnnnnnnnnnnnnnnnnnnnnnnnnnnnnnnnnnnnnnnnnnnnnnnnnnnnnnnnnnnnnnnnnnnnnnnnnnnnnnnnnnnnnnnnnnnnnnnnnnnnnnnnnnnnnnnnnnnnnnnnnnnnnnnnnnnnnnnnnnnnnnnnnnnnnnnnnnnnnnnnnnnnnnnnnnnnnnnnnnnnnnnnnnnnnnnnnnnnnnnnnnnnnnnnnnnnnnnnnnnnnnnnnnnnnnnnnnnnnnnnnnnnnnnnnnnnnnnnnnnnnnnnnnnnnnnnnnnnnnnnnnnnnnnnnnnnnnnnnnnnnnnnnnnnnnnnnnnnnnnnnnnnnnnnnnnnnnnnnnnnnnnnnnnnnnnnnnnnnnnnnnnnnnnnnnnnnnnnnnnnnnnnnnnnnnnnnnnnnnnnnnnnnnnnnnnnnnnnnnnnnnnnnnnnnnnnnnnnnnnnnnnnnnnnnnnnnnnnnnnnnnnnnnnnnnnnnnnnnnnnnnnnnnnnnnnnnnnnnnnnnnnnnnnnnnnnnnnnnnnnnnnnnnnnnnnnnnnnnnnnnnnnnnnnnnnnnnnnnnnnnnnnnnnnnnnnnnnnnnnnnnnnnnnnnnnnnnnnnnnnnnnnnnnnnnnnnnnnnnnnnnnnnnnnnnnnnnnnnnnnnnnnnnnnnnnnnnnnnnnnnnnnnnnnnnnnnnnnnnnnnnnnnnnnnnnnnnnnnnnnnnnnnnnnnnnnnnnnnnnnnnnnnnnnnnnnnnnnnnnnnnnnnnnnnnnnnnnnnnnnnnnnnnnnnnnnnnnnnnnnnnnnnnnnnnnnnnnnnnnnnnnnnnnnnnnnnnnnnnnnnnnnnnnnnnnnnnnnnnnnnnnnnnnnnnnnnnnnnnnnnnnnnnnnnnnnnnnnnnnnnnnnnnnnnnnnnnnnnnnnnnnnnnnnnnnnnnnnnnnnnnnnnnnnnnnnnnnnnnnnnnnnnnnnnnnnnnnnnnnnnnnnnnnnnnnnnnnnnnnnnnnnnnnnnnnnnnnnnnnnnnnnnnnnnnnnnnnnnnnnnnnnnnnnnnnnnnnnnnnnnnnnnnnnnnnnnnnnnnnnnnnnnnnnnnnnnnnnnnnnnnnnnnnnnnnnnnnnnnnnnnnnnnnnnnnnnnnnnnnnnnnnnnnnnnnnnnnnnnnnnnnnnnnnnnnnnnnnnnnnnnnnnnnnnnnnnnnnnnnnnnnnnnnnnnnnnnnnnnnnnnnnnnnnnnnnnnnnnnnnnnnnnnnnnnnnnnnnnnnnnnnnnnnnnnnnnnnnnnnnnnnnnnnnnnnnnnnnnnnnnnnnnnnnnnnnnnnnnnnnnnnnnnnnnnnnnnnnnnnnnnnnnnnnnnnnnnnnnnnnnnnnnnnnnnnnnnnnnnnnnnnnnnnnnnnnnnnnnnnnnnnnnnnnnnnnnnnnnnnnnnnnnnnnnnnnnnnnnnnnnnnnnnnnnnnnnnnnnnnnnnnnnnnnnnnnnnnnnnnnnnnnnnnnnnnnnnnnnnnnnnnnnnnnnnnnnnnnnnnnnnnnnnnnnnnnnnnnnnnnnnnnnnnnnnnnnnnnnnnnnnnnnnnnnnnnnnnnnnnnnnnnnnnnnnnnnnnnnnnnnnnnnnnnnnnnnnnnnnnnnnnnnnnnnnnnnnnnnnnnnnnnnnnnnnnnnnnnnnnnnnnnnnnnnnnnnnnnnnnnnnnnnnnnnnnnnnnnnnnnnnnnnnnnnnnnnnnnnnnnnnnnnnnnnnnnnnnnnnnnnnnnnnnnnnnnnnnnnnnnnnnnnnnnnnnnnnnnnnnnnnnnnnnnnnnnnnnnnnnnnnnnnnnnnnnnnnnnnnnnnnnnnnnnnnnnnnnnnnnnnnnnnnnnnnnnnnnnnnnnnnnnnnnnnnnnnnnnnnnnnnnnnnnnnnnnnnnnnnnnnnnnnnnnnnnnnnnnnnnnnnnnnnnnnnnnnnnnnnnnnnnnnnnnnnnnnnnnnnnnnnnnnnnnnnnnnnnnnnnnnnnnnnnnnnnnnnnnnnnnnnnnnnnnnnnnnnnnnnnnnnnnnnnnnnnnnnnnnnnnnnnnnnnnnnnnnnnnnnnnnnnnnnnnnnnnnnnnnnnnnnnnnnnnnnnnnnnnnnnnnnnnnnnnnnnnnnnnnnnnnnnnnnnnnnnnnnnnnnnnnnnnnnnnnnnnnnnnnnnnnnnnnnnnnnnnagcgctgtttggtgttccgacacgtgtatagctacgaacacggcaccgagtgggcggcaggacgtggtagcccgggccaatgcgctcgggacggcgtcaatagtgcgtagcgacgagatacactcggcatgatcggaggtctcgttcgatgcgggatggcgtcggagcggggatcggattggccacgtaggtagaggaggggacggcggcggtgtgcgggcagcgtgtgtgggcacgggaagcgttgtgttgtgcatgcgagggcgcaaaatttgggggcaggcaggtaggtttgatttttggcgcctcgatagctcagctgggagagcgtcagactgaagatctgaaggtccctggttcgatcccgggtcgcggcacttttgcgtccttttgctgtgctcgccgcactcgtttctgcggctctgcgggtctggcacgctgcctaccatggcgtgcccatcgtgctcgctgctgccgcgctgtttctcacccgcgacgattcctactgaccggctgcagtcggtgtggctggccccgggctcaagcgagctgcgggtcaatttcgaccagcgctgtttggtgttccgacacgtgtatagctacgaacacggcaccgagtgggcggcaggacgtggtagcccgggccaatgcgctcgggacggcgtcaatagtgcgtagcgacgagatacactcggcatgatcggaggtctcgttcgatgcgggatggcgtcggagcggggatcggattggccacgtaggtagaggaggggacggcggcggtgtgcgggcagcgtgtgtgggcacgggaagcgttgtgttgtgcatgcgagggcgcaaaatttgggggcaggcgggtaggtttgatttttggcgcctcgatagctcagttgggagagcgtcagactgaagatctgaaggtccctggttcgatcccgggtcgcggcacttttgcgtccttttgctgtgctcgccgcactcgtttctgcggctctgcgggtctggcacgctgcctaccatggcgtgcccatcgtgctcgctgctgccgcgctgtttctcacccgcgacgattcctactgaccggctgcagtcggtgtggctggccccgggctcaagcgagctgcgggtcaatttcgaccagcgctgtttggtgttccgacacgtgtatagctacgaacacggcaccgagtgggcggcaggacgtggtagcccgggccaatgcgctcgggacggcgtcaatagtgcgtagcgacgagatacactcggcatgatcggaggtctcgttcgatgcgggatggcgtcggagcggggatcggattggccacgtaggtagaggaggggacggcggcggtgtgcgggcagcgtgtgtgggcacgggaagcgttgtgttgtgcatgcgagggcgcaaaattttggggcaggcgggtaggtttgacttttggcgcctcgatagctcagttgggagagcgtcagactgaagatctgaaggtccctggttcgatcccgggtcgcggcacttttgcgtccttttgctgtgctcgccgcactcgtttctgcggctctgcgggtctggcacgctgcctaccatggcgtgcccatcgtgctcgctgctgtcgcgctgtttctcacccgcgacgactcctactgaccggctgcagtcggtgtggctggccccgggctcaagcgagctgcgggtcaatttcgaccagcgctgtttggtgttccgacacgtgtatagctacgaacacggcaccgagtgggcggcaggacgtggtagcccgggccaatgcgctcgggacggcgtcaatagtgcgtagcgacgagatacactcggcatgatcggaggtctcgttcgatgcgggatggcgtcggagcggggatcggattggccacgtaggtagaggaggggacggcggcggtgtgcgggcagcgtgtgtgggcacgggaagcgttgtgttgtgcatgcgagggcgcaaaattttggggcaggcgggtaggtttgacttttggcgcctcgatagctcagttgggagagcgtcagactgaagatctgaaggtccctggttcgatcccgggtcgcggcacttttgcgtccttttgctgtgctcgccgcactcgtttctgcggctctgcgggtctgacacgctgcctaccatggcgtgctcatcgtgctcgctgctgccgcgctgtttctcacccgcgacgactcctactgaccggctgcagtcggtgtggctggccccgggctcaagcgagctgcgggtcaatttcgaccagcgctgtttggtgttccgacacgtctatagctacgaacacggcaccgagtgggcggcaggacgtggtagcccgggccaatgcgctcgggacggcgtcaatagtgcgtagcgacgagatacactcggcatgatcggaggtctcgttcgatgcgggatggcgtcggagcggggatcggattggccacgtaggtagaggaggggacggcggcggtgtgcgggcagcgtgtgtgggcacgggaagcgttgtgttgtgcatgcgagggcgcaaaattttggggcaggcgggtaggtttgacttttggcgcctcgatagctcagttgggagagcgtcagactgaagatctgaaggtccctggttcgatcccgggtcgcggcacttttgcgtccttttgctgtgctcgccgcactcgtttctgcggctctgcgggtctgacacgctgcctaccatggcgtgcccatcgtgctcgctgctgccgcgctgtttctcacccgcgacgactcctactgaccggctgcagtcggtgtggctggccccgggctcaagcgagctgcgggtcaatttcgaccagcgctgtttggtgttccgacacgtctatagctacgaacacggcaccgagtgggcggcaggacgtggtagcccgggccaatgcgctcgggacggcgtcaatagtgcgtagcgacgagatacactcggcatgatcggaggtctcgttcgatgcgggatggcgtcggagcggggatcggattggccacgtaggtagaggaggggacggcggcggtgtgcgggcagcgtgtgtgggcacgggaagcgttgtgttgtgcatgcgagggcgcaaaattttggggcaggcgggtaggtttgacttttggcgcctcgatagctcagttgggagagcgtcagactgaagatctgaaggtccctggttcgatcccgggtcgcggcacttttgcgtccttttgctgtgctcgccgcactcgtttctgcggctctgcgggtctgacacgctgcctaccatggcgtgcccatcgtgctcgctgctgtcgcgctgtttctcacccgtgacgactcctactgaccggctgcagtcggtgtggctggccccgggctcaagcgagctgcgggtcaatttcgaccagcgctgtttggtgttccgacacgtctatagctacgaacacggcaccgagtgggcggcaggacgtggtagcccgggccaatgcgctcgggacggcgtcaatagtgcgtagcgacgagatacactcggcatgatcggaggtctcgttcgatgcgggatggcgtcggagcggggatcggattggccacgtaggtagaggaggggtgtgcgggcagcgtgtgtgggcacgggaagcgttgtgttgtgcatgcgagggcgcaaaattnnnnnnnnnnnnnnnnnnnnnnnnnnnnnnnnnnnnnnnnnnnnnnnnnnnnnnnnnnnnnnnnnnnnnnnnnnnnnnnnnnnnnnnnnnnnnnnnnnnnnnnnnnnnnnnnnnnnnnnnnnnnnnnnnnnnnnnnnnnnnnnnnnnnnnnnnnnnnnnnnnnnnnnnnnnnnnnnnnnnnnnnnnnnnnnnnnnnnnnnnnnnnnnnnnnnnnnnnnnnnnnnnnnnnnnnnnnnnnnnnnnnnnnnnnnnnnnnnnnnnnnnnnnnnnnnnnnnnnnnnnnnnnnnnnnnnnnnnnnnnnnnnnnnnnnnnnnnnnnnnnnnnnnnnnnnnnnnnnnngtcgactctgaggatccccctactgaccggctgcagtcagtgtggctggccccgggctcaagcgagctgcgggtcaatttcgaccagcgctgtttggtgttccgacacgtctatagctacgaacacggcaccgagtgggcggcaggacgtggtagcccgggccaatgcgctcgggacggcgtcaatagtgcgtagcgacgagatacactcggcatgatcggaggtctcgttcgatgcgggatggcgtcggagcggggatcggattggccacgtaggtagaggaggggacggcggcggtgtgcgggcagcgtgtgtgggcacgggaagcgttgtgttgtgcatgcgagggcgcaaaattttggggcaggcgggtaggtttgatttttggcgcctcgatagctcagttgggagagcgtcagactgaagatctgaaggtccctggttcgatcccgggtcgcggcacttttgcgtccttttgctgtgctcgccgcactcgtttctgcggctctgcgggtctggcacgctgcctaccatggcgtgcccatcgtgctcgctgctgccgcgctgtttctcacccgcgacgattcctactgaccggctgcagtcggtgtggctggccccgggctcaagcgagctgcgggtcaatttcgaccagcgctgtttggtgttccgacacgtctatagctacgaacacggcaccgagtgggcggcaggacgtggtagcccgggccaatgcgctcgggacggcgtcaatagtgcgtagcgacgagatacactcggcatgatcggaggtctcgttcgatgcgggatggcgtcggagcggggatcggattggccacgtaggtagaggaggggacggcggcggtgtgcgggcagcgtgtgtgggcacgggaagcgttgtgttgtgcatgcgagggcgcaaaatttgggggcaggcgggtaggtttgacttttggcgcctcgatagctcagttgggagagcgtcactgaagatctgaaggtccctggttcgatcccgggtcgcggcacttttgcgtccttttgctgtgctcgccgcactcgtttctgcggctctgcgggtctggcacgctgcctaccatggcgtgcccatcgtgctcgctgctgccgcgctgtttctcacccgcgacgattcctactgaccggctgcagtcggtgtggctggccccgggctcaagcgagctgcgggtcaatttcgaccagcgctgtttggtgttccgacacgtctatagctacgaacacggcaccgagtgggcggcaggacgtggtagcccgggccaatgcgctcgggacggcgtcaatagtgcgtagcgacgagatacactcggcatgatcggaggtctcgttcgatgcgggatggcgtcggagcggggatcggattggccacgtaggtagaggaggggacggcggcggtgtgcgggcagcgtgtgtgggcacgggaagcgttgtgttgtgcatgcgagggcgcaaaattttggggcaggcgggtaggtttgacttttggcgcctcgatagctcagttgggagagcgtcagactgaagatctgaaggtccctggttcgatcccgggtcgcggcacttttgcgtccttttgctgtgctcgccgcactcgtttctgcgcctctgcgggtctgacacgctgcctaccatggcgtgcccatcgtgctcgctgctgtcgcgctgtttctcacccgtgacgactcctactgaccggctgcagtcggtgtggctggccccgggctcaagcgagctgcgggtcaatttcgaccagcgctgtttggtgttccgacacgtctatagctacgaacacggcaccgagtgggcggcaggacgtggtagcccgggccaatgcgctcgggacggcgtcaatagtgcgtagcgacgagatacactcggcatgatcggaggtctcgttcgatgcgggatggcgtcggagcggggatcggattggccacgtaggtagaggaggggacggcggcggtgtgcgggcagcgtgtgtgggcacgggaagcgttgtgttgtgcatgcgagggcgcaaaattttggggcaggcgggtaggtttgatttttggcgcctcgatagctcagttgggagagcgtcagactgaagatctgaaggtccctggttcgatcccgggtcgcggcacttttgcgtccttttgctgtgctcgccgcactcgtttctgcggctctgcgggtctgacacgctgcctaccatggcgtgcccatcgtgctcgctgctgtcgcgctgtttctcacccgtgacgactcctactgaccggctgcagtcggtgtggctggccccgggctcaagcgagctgcgggtcaatttcgaccagcgctgtttggtgttccgacacgtgtatagctacgaacacggcaccgagtgggcggcaggacgtggtagcccgggccaatgcgctcgggacggcgtcaatagtgcgtagcgacgagatacactcggcatgatcggaggtctcgttcgatgcgggatggcgtcggagcggggatcggattggccacgtaggtagaggaggggacggcggcggtgtgcgggcagcgtgtgtgggcacgggaagcgttgtgttgtgcatgcgagggcgcaaaattttggggcaggcgggtaggtttgatttttggcgcctcgatagctcagttgggagagcgtcagactgaagatctgaaggtccctggttcgatcccgggtcgcggcacttttgcgtccttttgctgtgctcgccgcactcgtttctgcggctctgcgggtctgacacgctgcctaccatggcgtgcccatcgtgctcgctgctgtcgcgctatttctcacccgtgacgactcctactgaccggctgcagtcagtgtggctggccccgggctcaagcgagctgcgggtcaatttcgaccagcgctgtttggtgttccgacacgtgtatagctacgaacacggcaccgagtgggcggcaggacgtggtagcccgggccaatgcgctcgggacggcgtcaatagtgcgtagcgacgagatacactcggcatgatcggaggtctcgttcgatgcgggatggcgtcggagcggggatcggattggccacgtaggtagaggaggggacggcggcggtgtgcgggcagcgtgtgtgggcacgggaagcgttgtgttgtgcatgcgagggcgcaaaattttggggcaggcgggtaggtttgacttttggcgcctcgatagctcagttgggagagcgtcagactgaagatctgaaggtccctggttcgatcccgggtcgcggcacttttgcgtccttttgctgtgctcgccgcactcgtttctgcggctctgcggtgtctggcacgctgcctaccatggcgtgcccatcgtgctcgctgctgccgcgctgtttctcacccgcgacgactcctactgaccggctgcagtcggtgtggctggccccgggctcaagcgagctgcgggtcaatttcgaccagcgctgtttggtgttccgacacgtgtatagctacgaacacggcaccgagtgggcggcaggacgtggtagcccgggccaatgcgctcgggacggcgtcaatagtgcgtagcgacgagatacactcggcatgatcggaggtctcgttcgatgcgggatggcgtcggagcggggatcggattggccacgtaggtagaggaggggacggcggcggtgtgcgggcagcgtgtgtgggcacgggaagcgttgtgttgtgcatgcgagggcgcaaaattttggggcaggcgggtaggtttgacttttggcgcctcgatagctcagttgggagagcgtcactgaagatctgaaggtccctggttcgatcccgggtcgcggcacttttgcgtccttttgctgtgctcgccgcgctcgtttctgcggctctgcggtgtctggcacgctgcctaccatggcgtgcccatcgtgctcgctgctgccgcgctgtttctcacccgcgacgattcctactgaccggctgcagtcggtgtggctggccccgggctcaagcgagctgcgggtcaatttcgaccagcgctgtttggtgttccgacacgtgtatagctacgaacacggcaccgagtgggcggcaggacgtggtagcccgggccaatgcgctcgggacggcgtcaatagtgcgtagcgacgagatacactcggcatgatcggaggtctcgttcgatgcgggatggcgtcggagcggggatcggattggccacgtaggtagaggaggggacggcggcggtgtgcgggcagcgtgtgtgggcacgggaagcgttgtgttgtgcatgcgagggcgcaaaattttggggcaggcgggtaggtttgacttttggcgcctcgatagctcagttgggagagcgtcactgaagatctgaaggtccctggttcgatcccgggtcgcggcacttttgcgtccttttgctgtgctcgccgcactcgtttctgcggctctgcgggtctgacacgctgcctaccatggcgtgcccatcgtgctcgctgctgccgcgctgtttctcacccgtgacgactcctactgaccggctgcagtcggtgtggctggccccgggctcaagcgagctgtgggtcaatttcgaccagcgctgtttggtgttccgacacgtgtatagctacgaacacggcaccgagtgggcggcaggacgtggtagcccgggccaatgcgctcgggacggcgtcaatagtgcgtagcgacgagatacactcggcatgatcggaggtctcgttcgatgcgggatggcgtcggagcggggatcggattggccacgtaggtagaggaggggacggcggcggtgtgcgggcagcgtgtgtgggcacgggaagcgttgtgttgtgcatgcgagggcgcaaaatttgggtgcaggcgggtaggtttgacttttggcgcctcgatagctcagttgggagagcgtcactgaagatctgaaggtccctggttcgatcccgggtcgcggcacttttgcgtccttttgctgtgctcgccgcactcgtttctgcggctctgcgggtctgacacgctgcctaccatggcgtgcccatcgtgctcgctgctgccgcgctgtttctcacccgcgacgattcctactgaccgactgcagtcggtgtggctggccccgggctcaagcgagctgcgggtcaatttcgaccagcgctgtttggtgttccgacacgtctatagctacgaacacggcaccgagtgggcggcaggacgtggtagcccgggccaatgcgctcgggacggcgtcaatagtgcgtagcgacgagatacactcggcatgatcggaggtctcgttcgatgcgggatggcgtcggagcggggatcggattggccacgtaggtagaggaggggacggcggcggtgtgcgggcagcgtgtgtgggcacgggaagcgttgtgttgtgcatgcgagggcgcaaaattttgggcaggcgggtaggtttgacttttggcgcctcgatagctcagttgggagagcgtcagactgaagatctgaaggtccctggttcgatcccgggtcgcggcacttttgcgtccttttgctgtgctcgccgcactcgtttctgcggctctgcggtgtctggcacgctgcctaccatggcgtgcccatcgtgctcgctgctgtcgcgctgtttctcacccgcgacgattcctactgaccggctgcagtcggtgtggctggccccgggctcaagcgagctgcgggtcaatttcgaccagcgctgtttggtgttccgacacgtgtatagctacgaacacggcaccgagtgggcggcaggacgtggtagcccgggccaatgcgctcgggacggcgtcaatagtgcgtagcgacgagatacactcggcatgatcggaggtctcgttcgatgcgggatggcgtcggagcggggatcggattggccacgtaggtagaggaggggacggcggcggtgtgcgggcagcgtgtgtgggcacgggaagcgttgtgttgtgcatgcgagggcgcaaaattttggggcaggcgggtaggtttgacttttggcgcctcgatagctcagttgggagagcgtcactgaagatctgaaggtccctggttcgatcccgggtcgcggcacttttgcgtccttttgctgtgctcgccgcactcgtttctgcggctctgcggtgtctggcacgctgcctaccatggcgtgcccatcgtgctcgctgctgccgcgctgtttctcacccgcgacgactcctactgaccagctgcagtcggtgtggctggccccgggctcaagcgagctgtgggtcaatttcgaccagcgctgtttggtgttccgacacgtgtatagctacgaacacggcaccgagtgggcggcaggacgtggtagcccgggccaatgcgctcgggacggcgtcaatagtgcgtagcgacgagatacactcggcatgatcggaggtctcgttcgatgcgggatggcgtcggagcggggatcggattggccacgtaggtagaggaggggacggcggcggtgtgcgggcagcgtgtgtgggcacgggaagcgttgtgttgtgcatgcgagggcgcaaaattttggggcaggcgggtaggtttgatttttggcgcctcgatagctcagttgggagagcgtcagactgaagatctgaaggtccctggttcgatcccgggtcgcggcacttttgcgtccttttgctgtgctcgccgcactcgtttctgcggttctgcgggtctggcacgctgcctaccatggcgtgcccatcgtgctcgctgctgccgcgctgtttctcacccgcgacgattcctactgaccggctgcagtcggtgtggctggccccgggctcaagcgagctgcgggtcaatttcgaccagcgctgtttggtgttccgacacgtctatagctacgaacacggcaccgagtgggcggcaggacgtggtagcccgggccaatgcgctcgggacggcgtcaatagtgcgtagcgacgagatacactcggcatgatcggaggtctcgttcgatgcgggatggcgtcggagcggggatcggattggccacgtaggtagaggaggggacggcggcggtgtgcgggcagcgtgtgtgggcacgggaagcgttgtgttgtgcatgcgagggcgcaaaattttggggcaggcgggtaggtttgatttttggcgcctcgatagctcagttgggagagcgtcagactgaagatctgaaggtccctggttcgatcccgggtcgcggcacttttgcgtccttttgctgtgctcgccgcactcgtttctgcggctctgcgggtctggcacgctgcctaccatggcgtgcccatcgtgctcgctgctgccgcgctgtttctcacccgcgacgattcctactgaccggctgcagtcagtgtggctggccccgggctcaagcgagctgcgggtcaatttcgaccagcgctgtttggtgttccgacacgtctatagctacgaacacggcaccgagtgggcggcaggacgtggtagcccgggccaatgcgctcgggacggcgtcaatagtgcgtagcgacgagatacactcggcatgatcggaggtctcgttcgatgcgggatggcgtcggagcggggatcggattggccacgtaggtagaggaggggacggcggcggtgtgcggtcagcgtgtgtgggcacgggaagcgttgtgttgtgcatgcgagggcgcaaaattttggggcaggcgggaaggtttgatttttggcgcctcgatagctcagttgggagagcgtcagactgaagatctgaaggtccctggttcgatcccgggtcgcggcacttttgcgtccttttgctgtgctcgccgcactcgtttctgcggctctgcgggtctggcacgctgcctaccatggcgtgcccatcgtgctcgctgctgtcgcgctgtttctcacccgcgacgattcctactgaccggctgcagtcggtgtggctggccccgggctcaagcgagctgcgggtcaatttcgaccagcgctgtttggtgttccgacacgtgtatagctacgaacacggcaccgagtgggcggcaggacgtggtagcccgggccaatgcgctcgggacggcgtcaatagtgcgtagcgacgagatacactcggcatgatcggaggtctcgttcgatgcgggatggcgtcggagcggggatcggattggccacgtaggtagaggaggggacggcggcggtgtgcgggcagcgtgtgtgggcacgggaagcgttgtgttgtgcatgcgagggcgcaaaattttggggcaggcgggaaggtttgatttttggcgcctcgatagctcagttgggagagcgtcagactgaagatctgaaggtccctggttcgatcccgggtcgcggcacttttgcgtccttttgctgtgctcgccgcactcgtttctgcggctctgcgggtctggcacgctgcctaccatggcgtgcccatcgtgctcgctgctgtcgcgctgtttctcactcacgacgactggctgcagtcggtgtggctggccccgggctcaagcgagctgcgggtcaatttcgaccagcgctgtttggtgttccgacacgtgtatagctacgaacacggcaccgagtgggcggcaggacgtggtagcccgggccaatgcgctcgggacggcgtcaatagtgcgtagcgacgagatacactcggcatgatcggaggtctcgttcgatgcgggatggtgtcggagcggggatcggattggccacgtaggtagaggaggggacggcggcggtgtgcgggcagcgtgtgtgggcacgggaagcgttgtgttgtgcatgcgagggcgcaaaattttggggcaggcgggtaggtttgacttttggcgcctcgatagctcagttgggagagcgtcagactgaagatctgaaggtccctggttcgatcccgggtcgcggcacttttgcgtccttttgctgtgctcgccgcactcgtttctgcggctctgcgggtctgacacgctgcctaccatggcgtgcccatcgtgctcgctgctgtcgcgctgtttctcacccgtgacgactcctactgaccggctgcagtcggtgtggctggccccgggctcaagcgagctgcgggtcaatttcgaccagcgctgtttggtgttccgacacgtgtatagctacgaacacggcaccgagtgggcggcaggacgtggtagcccgggccaatgcgctcgggacggcgtcaatagtgcgtagcgacgagatacactcggcatgatcggaggtctcgttcgatgcgggatggcgtcggagcggggatcggattggccacgtaggtagaggaggggacggcggcggtgtgcgggcagcgtgtgtgggcacgggaagcgttgtgttgtgcatgcgagggcgcaaaattttggggcaggcgggtaggtttgacttttggcgcctcgatagctcagttgggagagcgtcagactgaagatctgaaggtccctggttcgatcccgggtcgcggcacttttgcgtccttttgctgtgctagccgcactcgtttctgcggctctgcgggtctggcacgctgcctaccatggcgtgcccatcgtgctcgctgctaccatgctgtttctcacccgcgacgatccctactgactatctcaggttttacggataggacacacaatcttaggcacaattagcggtaaataaacgttaatcggctttaattctgcctggatctatagctcacacacacggtacggattgcataccggggtacacctgaaaaactctagatatatcgaaatcaacgttcgattgaaaaatcgaatgctattcgcaattacttaagggactgtgtttttacgacaggtggtgaattatggccttgctaatttgtaggttggagggtattgtgaaaaccggcaaagatgtccagaccagattagcttgattaggaggggtagaaaatatataaaaaggggtattgctgtttgcagatattttggccaacgcatgattatctctcgtcaataatctcgattttaatccagccagctcttaattaagacctaggtctgatttatatatatcgccagtactggtttaacatgcaagcttgggactctgttttcccgaccaaaacgcttttctgcggcttggaaacgcagaaatgccattctagacgggccaaaccgagtttctgggcctaaaagcggccttcaccaaagcacaaagctaaaacagccctcgcctatctcgtgtccactcattgtaagagacaggcgtggtctattttagaggtctattttagaggacaaagtatttgcaagcggcaatacaccaaatcctaaatcgctgcgttggtcgtaaaccgtccatgtgcaaatccctatcaaatgccaatgatagcatagcttcctgagctatataaatggccgcagaggtgcactgcatcgtgcagcgggctagagcaagcgtataagcagctactcgtgccaaatttcagcccagtgaatagttcagacgcagacacatattgcatgtacccatcggttgtttcatgtatacggcagcgtcgagtttgccgtccacgttgacttgggcaccgttcatataaacgagctacctcataattcgacgtgatttgattataaatcgatggcagtccgcggtatatgaacaaggctggggaacgccaaatcggagtagcatcctatttatatataacaaaacaaggtttcagctgcttaataagcacccaaatcgatcgatttgcaaaaaataggacatagtgttcggttttcacaatatatctttaggatatttcaaacataaccgaacaaaacgctccagaagcgaggtcgttgccgcctcaccgctgctactacgctacatgtgttagtagtggtcagctacacatttagacgcaaccgcactcgaaacacataggtgcggatatagttggtcacaatcgttcagatgtgacgtcgccttttaacgcgagaatcagtgttaacttaaaaagaaaacggacccgaaaaacaagggcacaaacaccggtaggcccccacgcccgtatcaagcctcaatcaaatacatatagccttatcagcacaaaaaaaagtaaaatggatggcagcttgacacaaacaaacttaattatacttgcatttgaatcagtcctggatacactacgaaaacaaatccctgttgcttcaagtcaggattctgcgtgattaggaattcgtgtcgatggtgcctctcatattggagaccatgaggccgcaccacgccatgactccctgtagaagaccctgctgagtgtcttgaggcagcggaaatggtgggcgatggatcttcacaaagccggcacggcgcatagtcaccaccaactcctcattctctcccccgcactcactttcctttccaccaccagccccaccaacgatcttcttcttcttcttcttgagagctgtcagcacgatagcccccatttggtctttgcggacgcattcttccgggctatacggataaatctcgtctacgtctacgctgtctctgaccagaactgcaaacggctcgttgctttcggactgctcggcgtccacgtattgagcaaaagaggcggtattcacctcggtcttgacgccgttctcattcgctgaagagagtcgacagttggtgaagttacccgccgccacgctcaagtcgtcccgcactgtgatgtatccgagccactcagagatggagatctcctcgttaatcaagtagaatctagcggcgtcgaacacagttcgcagggacttggcacccgtaaactgcgtcacatcgaagagagagaagcacaaattcccctctggatcacaactgctcgctggatgagtacggctgcagtaagtcgagatggcgacttcgagactcaacgtaatccactccgttttggattttgaagtcgcggattgctgacagcgtcctccgacgcgattcagggtcagttcctagatgaatgtaggagtacagaggactgggcaccgaccctcgctgttgaaatgcatgggagacactgtaatgagcccaaattcacccagaattcagtcgaaaatagcgtaccaagcaggctgatagccccgcctgggcattagcgaccagtaattgctgctggcggagaacactgctgagcaccatgttactggtcgccgctttctcgaggttacggtccccagtgagccccacgcgctctttcaaatctgccagctgagcttcgagctcttgaacctcttggtccagcctcttcctgttcacataatcaccttcatgtcgttgcctgtaacggagtacaactccgttgatgacacctagaaggattactctgtgtttactttagttcaggttaagatgacgctaggtttactcttagaatgactggctgcaaaagagcagcaaccaagaaggaaaacccggactaggccaagctaaatacacttttcattccgctttcaagagagtaaagcctacgacgttacatagtagcacttgtcgttgtcaagtcctcggcgccatcgagctaccgagtccaagttccagaccatcgagtccgagtttcagaccatcgagtcacgaagccatcgagccgacccaagtgtagccatcgagccgcaccaatatggacgcctgcaacgcgccacaaacgtttagtgagatgttgcagttttttgctcaacaacaagaacaatttcacgcacgaatgaatgagcaaatagctgctcaagctgcgcgccttgaagcaatcactagcaagccacctgctgcccggaaggcggagccgcccaagtaccacggcacgctcaatgaggacctagagctgtggttttttcatgatcgaacaatactacgccgactatcacccgatcatggtggagaacagccccgcgttcgtcaccatggtgtcgtgctaccaggcacccacgcctatgatttggtatcggcagtttgtggccgagtgtgatcgagcccaaattgtccgaacctgggagacgtttaagggtgctatgcgcaaacgttttctgccaccggacaaggactatatgctgcgcgagaaactctgcaaactcacgcaaattggctccctgcacgactacctgagcgcctttcaagatatcctgatccaatgccaagtggccattacccccatggaattgcggttctactttcaacaggggcttcgatcggagacgtcccaccatctccgagaacatcaccccgctacgctggaagagaccatcgagctcgcgttgcgctttgatcatggggtcactggaggaagcatgccagtaaccacggccaagtggacggaaaccgcgacgtgtcatcgttgcaagcaagttgggcatatcgcttccaactgcccttcggtcaaggggtaagcgtgtttttaaagtggggtcgtgtaacggagtacaactccgttgatgacacctagaaggattactctgtgtttactttagttcaggttaagatgacgctaggtttactcttagaatgactggctgcaaaagagcagcgacaaagaaggaaaacccgaactaagccaagctaaatacacttttcattccgctttcaagagagtaaagcctacgacgttacattgccagagtggggattcagtgcttacaacgctacacgaagtcaactcaccttcttcaccaagtaggtagctttccgctttttcacggggcgaaacgtggtgttggcattcgagttgttgctcgcatgggaaggtaggccgtgttgcttctggttgtcgttgctactggttgccatcctcccattcccgcccctgttgaatccacttgagtcttgggcggtgaaatgcggaatggtcgttggtttccgttgatattctggaccgacgaacgaagtggacacagtcctacatgtagcaacagcaccggcaccgcttctccgttattctgagaggggtctgaaagggatatccctatattttgagtcttgacatgcagatttcccgctaactcgaggagtcaagcacagtacgcctggatgccgatgcgggttttcccaagccccccccccccccactcgaagaaacaaagggcctccctccaagcttcatgaaggcagccacgacaatataatcgcctctcgtaggccagcacaagtttccaccagagtgacgcgtgcagcgcatttgaacgtcttgcagttagtgagctacttcaaaaccagagcaaaggcaatcgtcattatttgatgatagacgtggttttgatattactcgaagagagaagctttttgaacaactaatgacagaataacataccggcaccagtaccctatgatgaaagatagcaatgcaactttaccctgcgctcgtgcattaatctacattcgagtcacctgtggatcgtttaccgtcgctcgtaagatgctgctgcttcacttcaccatcatatcgatcatcctaaaggcgtgcatcttcatgcccagatcaaaattttctccaccaaagcacacgtatccgatggatgaaaagcggcacaagtccacgaacatgaggcgcaaggtattacagccttccgtcattcttcctacacctattgagatcaactaggcgactcctttgactgctcagaaagagaataaagacctgcaagaagaaattcgtcaactgccatccaagctgcagcaactacaacccccaagaagccaagaagatgagaacactctcctatcttccatcatacgccaacatcaactcgaaattgctagtgctcacccgatgtacagtgtcccagtgatatgatctctaccctgccattctaatggactttggtgacttaatttactaacatgacgctcttaacaacagcaaagccaccctattgtctcgtatatccgcctgaaaaagagctggcacgaccgcaacgagacgcttctcgccatcatccctcggataacgatattggcgtctccacagcgctcaattgcgtcatgttctcgcagctcttcgatgcgggtgatgggatcatcccaggtgctgcgccctgtgcgacgacacgtccttcctaatgagctcagtcgactggtaatatgggaggagctcgtcttctcgtccacagactcaagctccacgacccacaggacacgaccagccgctaccacttgtcggaaccaccgaagaactgcacgaacctatcgcagttaagctccgttgcaatgtcgaagtggctggtcgagacgatgcggccgttggcacagtgcacagtcgcagtcgtcgccgagtgccagtcagcagagctcaattttgtttgggccagagtctgactgggtagtggattcttgaatcatgcacccaagtaggagatagtactccaccacatgagctcggcgctccatgcaacgagtgcaaaccccgagtcgtggtttgctctgtcgagcacgcttattgggtgagaacacattcccggttatcacaccatccaggccctccgcagggaagagcacaaggtgtcggagacccaagtctgcatcactggacatctaatctactgcagagctcaactgcctcttgttgcaatggcggagaagaggcgcaaggccaccgtcacgaagcggaaggtagagagggccagccgcttcggggcacatacaaggcaccgagtttctaaagacgctgttgtttactatggcggcaggaggagatcagcgacctgaaagccgagatccgcaagctgcggtcggagctggggctccaattggagctgaaagagctgcacgttgtaccagccaggacccctccactagggcaagtcgtctcggacaatgaagcgctgtcttctgctatccatggtcaacagctcgacattgctcgggttcactcgacactgtcacctccattggtgcgtagcaagtttttaatttctaacagggaggctctaaccgtgatgatgcaatggcttaagcaggagctgcatccgttgtgtgcgcgcatctgtctgaagaggagctgggaagaccgcagccggacgctcctggatatccgagagcagaaattccaagctgcgtacgagtacgtcaaggcgcggagtgagctctcgtcctcccactcaagcgacgagcggcttgagactgcgtcgggcgacgtgtgctgctccatcttccagacgatcaagttcccccacgtggcgtcgctcagacaggtgtacgacgctgtgctcttcagcatgaacaacgtggagatcagcatctgcgagcggctggggcacgtcacgacgcgagacgactacgactgcgccgacaacagcatcctcaatgcgcggattgtctcgaccaatgacttgggcgtcacgacggaagtgagcggcatcatgttctcgcgcttcttcgaggcagctgagggattccacggcgaaccgtgtgggatgctcgttatcgactcggtggatgaggacgagctctacccttacgccccgagtgaacgagtccgcaaggacgtatctgcggcgtttgtgctgacgacagatagactgcaaaagggaagcgatgagctggtggtgacgctccgacgggctgccttcgtgaagctccactaccccgagttcgacttgtcggagcgcgtttggcaggacctgcagcaagatgtcgcaaggtggggcgacatcaccaccagagctatccgcagtgtactgtactcggttccttgaacggcctggaaaccagaaggctcgatagccgtatatccgcttcaaacctctctacgagaagagcgagaaagagagaaaaaatgctcgtgttacaaccgaagttttcatggtggggacaactagaattgcattggttccacctctggctaggtagtgctataatagctggataataaaaccagtacaagtacgtcttcatttcatttcgcaaacccaacaacgttacacagcaaagagaataacactggccaagtttactttatttttcgaggagcacctctgtatttctctctcctcctaccctcacctatcgtctcgcaaagttatcaagcaccttaaacaagagtttatcttagtggtaccagtgaggaataactccctgcgcttgcatccgcttccaccactgataatagtagtggtagaccttcgcgttgttctgatattcttggtacgtgcggctcaagtagactctgttgtacgcatgccacagcgtatcacatttgcatgaacatatcgtccatggtgactgcgtacggcgtggagcgctgcatccaagatgtgcgggatccctcgatcttcagcgtcagtggtgctcgggcggttctcgtttatcgcggcagcccctctcagttttaatttgccgacgtggaacttgggaggagtcttggggggcatcttcaggcttctcacatggttggagcagccgcttcaacggtagtgaggaaggcgaccaacgtcacgaggagagtccaggagatcaagcgcatggctggtaaggtggtgagtgtaggtactcttgagcgcaaggaggtgaattgaaaactgagtcgtgtggaaccggtgattctggtggctggtaacaatgaagccaattttccgaggataaaccttcgatcctctggtagcatccgatttgctgtccaggattgaatctgaattagacagtgtgaaaaatacgaagcaatcaagattcgcactaagaaccaagttattaataatttatctatctggcccaagcggaccctctcaatgcggcgcgccttcttgttgctaccactggcggtcgccttggccggacgctgcacggcccttgctaaccgcgtgatcacgaacgacctgggcggtcaccgcaatctgaaggaccacgagaatgacatcgaaactgaagctgcaactgaagaacggctgaatatcccagggctcaaatctctcaagcccctcttccaaaataacccgaccgcggccaaagctctcgagaagaaccccaccgcgcttaagacgctacaggataatcctgcgctcggaaagcaggtcgaggcgcaggtcagccaacctggtgccatcaagaagctgcgatccaaccctcgcgtcgacaagctcgcgagtagtttggcgaaacaagctgtccagaagaacatggcgaacgaagccttgacgcccagccagcagaaactttacaacaattttgcttgggcggttgcagtcgtcgtcgcagcaaccgtcttcggcgtctcaatggtactgcgtggtcgttcatgttcagaataatacagctcctcttgagtactacggcacacttggctaccaattagcactcactcactctacggcaccgagtggagcagacttctgatgctcctgcgcatgatgtcgtcccaagcggcgacgtcttgctgcgcttcttgccacgcagccgatatagggaagctcgggtgatgaagcttcacaaatgcagcgcgtcttaaagtcgcagtcaagtctccaccgctcttagggtctgctgtcaccacgacggctgaagaaacgtctttccgaatgcgatcgctggactcgtacgggtaaagctcgtcctcatccaccgagtcgatgactagggcgcagcgcccccctgggaggatctcatcaaccgcatcgaagagctgcgagaacatgacgcagttgagctctgtggagatgccgagatcgttgtcgagacgatccgagcgttgaaagtgttgccgtctcctccgccgtcgtagtcgtatcgcgttgtgatgtggcccgagcgctccgagatgctgatctccgcgttgttgaagctgtagacgactgcctcgtgcacttgcttgagcgactccacgcctgggagttgaattgtctggaagaggacgcagcaaacatcgccgtcggcggtctcaaagcgctcgtcactcaggtgaggctggttccagggggtgatcccactgcgctggacgatgtgctcgtacgcagctcggaatttctggtcgcggatggcgagaagtgtctcgttgcggtcgtgccagctttttttcaggcggatatgcgagtaaagagcgtgaatttgctgtagtgtaaacatcctgttagtaaaatttgggtcaccacgtccaagacaaaaaaacacacacaattcgtaccagtgggagactgcaaatggagtgaacgctggcaacatccagttggtgttgatgaatgatggaagatagaagagtattctcccctttttggcttcttcggggttgcagttgttgcagctcggattgcagtttgcgaatctcttcatgcaggttttccttctctttctgcgcagtcaaaggagtcgaccattatacgccaatacatgggaaggataatgaaaatatgtaatacaagtaccttgcgtctcatggtcgttgatttgtatcgcttttcagccatattttgttgttgtcggctcggtgtgcttttcacggagaatattttgaactgaacatgcacgaagtgactttacgtacgcgggaatgatggtgaagtgaagcagtcagttttttttttttcagaagcgtggattcgagcttgcacgatttttttatactgtgcgtcctgctaccatcgtcattcccagcgtcgcgtggaaaacaaacacaaatggattaaaacctcgaatatgctgcctggagaatccgaagatcccttcgaacactttaatgctacgactacctgacatccccccaccgcgcgatccccccttgcaactcctgcaacgccgcttcgtcaactgggaactgcgggtagaacagcttgaaaaaggctgcacgccgcatggtcacgaccacgtcaacgtcgtccgcttctccaccagctcgattcttagattttctcgtctttggttcgttcaccgtcaagacaattgcgccggcagtgtcacgtcgaatgcgttcgctggggacgtatgggtacatctcgtcttcatcaacggactggacaactaacactccgtattcctcgatggcgccgccaagtccaagaccgtcttcacccttgcgaaacaagtgggaaaaggtgacgacgttcccttcaatcgtcagtccacggtcgttggtcgacaagacgcgcgtgttgtagatcttgtcatcgacgcagtcgtagtcgtcttgcaccgtaatgtggcccagtctctcggagatgctgatctccaggttggtcacgtagaacatgagcgcgtcccagacttgctggagggactttacaccagggaactccacggtctcgtagcggatgcagcacagatccccgtcgctcgtcacgaatcgctcgtcggactgcgtgtgcctcgcgctggcgacccgacttggatccatgacgaaccggtacccgttgagcagttggtccttttccagttcaatcggaagattttccggcgcttgtcgtagcctttaggcagtcgaaggcaagtgtagagtggatgtgtatgcatttatccctcacagtaacaattagttacaatattgattcaagaagcagtgttagcagtttcatacgcaccagcctcgcccccatgagggactgcgctgaagcaacttcgagctgcagattgtgaccgaagtttttcaagactgggttttctgccgcggcttgttgaaacaccgaatcgattttcgcagcttcttcatgaggcagcgagtgggtctggagcacgatcagctcggattcgagtcggcggacttcagactttagggcattggcattttcctgtggattatttgtcactcatagcgtcaggtgaaacgagcgacgaggacagttatcatggagctataagcggcaaagtccacgtactcggcgcacactgtacgtgcacttgcgagccttcttgggcttttcgctggtgactgtgcggcttggcactgcatcctgcgactgcagcatagcagctacgtggctggatccgattgttgtttgcaaaaatctgtccgtaaccgccggatttttttttatttgggaggcgtcaacaatcctcgctaaaaactgctttccatgaaattgtatataaaaacgtttggtggtcaatgcaaggcgaggaggatttcgcaaagcgtggtgtcaacagagcaaatctggactgacatgtgaaagtaaaagctttagcctaaagttcggagtacacgcagctacggatggtcttcatcagtacgtccccccaccttcatcagtacgtccccccaccagccgattccagcctgcagctcttgacgtgtcgcctccgacactgggaactgcgggttgtagagtttcaagaacgcagctcgacgtaacgtcacgaccagctcgtcttcactctcgcggtccttgaccggccgtctgctcgctgtcaagataatggcccccgacgtgtccagacgaaagcgctctttcgggaagtacgggtacacttcgtcctcgtcgaccgagtccagagccaaaattccacacgcctgtccgccaaaacctttgtcgtcttctgtgaaaaagcgcgagaacgtgacaatgctgctctcgactggcgtgcagttggccgagcgcgacagaacgcgaatgttgtacacactgccgtcgatggtgtcgtagtcgtccctcactgtcgtgtgccccagtctctcagagatgccaatctcgatcgtattgtagtggaacagcagcgcctcccacactttctccagtgactcgacccctgggaaatgcatcgcctccaggtgcaccgagcacaaatctcactctgaagtctcatatcggtggtccgacgtgtgcggcttgtccggatccacgaatctcccggggaccatgaggaatcgtacgcactcctcaatttctcttggcgaacggccatcagcgtcttccggcgctcgtcccagtccttggtgaggcagatcttggtgtacagcgggtgcgacgcttgatccccctatacaagcatattgacaacttttaatcaagaatcaaatatcataaaatagaatataaaacttacaaaacattcgaccagcatggactgggcgttggccactgcgagctgctgcttcttggctagcgacctcatgaggttgttctcagccacgacatgctgcacgacggggtccagcagcgccgtgtcttcgggcgagagggagcggacctgcagctcctgcagctccgaggtcagtcgcttcacttcctcgcggagctgctccgtctcctcctgcagaggcgatagattatagagtgatatgagtattataggatcgagggggattcttgttgaggggcacacggatcacccgcccctgcttgtaatattgaccgcaaggtactgagtgaggtatgaaattgtagctcaagatttcagcaaccagagacgataccagctaactaaattcatgaatagattttttagcataaagttgtcgcgtgacgaaagcggcaacaccaggtctgccttcgcttggcaactatagcccccactgacacaggcgccagcatttctgctgttatcttatctatctaaggcgttaccagcaaacttagcaaagatagcattgcttgtcgagcgcaccggcgtgatcatccgtgcgacgcattcacaataccactttttgactatctggtagtcatggctatcccgaccacgtggtcgtgataagtgctcccggctcgcgggtagattgcacctcctgcagtaaggctagtgtacatgtaattacatgttagtgaacgttacctacatgtattcgatccgttctcaccactatgtcttatttactcaggtatttgtctacgtactcagtgggctaacgccatgacgcgttgattagctcatcataatagctttcgtcccacaaaaagcgatacatgtactgtatgtacctggtcattgcgagaagttcgtcatgaagaagcagaagtgctcctacactgcgcgtcgagtggttggctaaaagttgctatcgaaaattctacgaaactggcaatttgccttatctgaattattagggctgtttcgtgcagtgctcgaaagtgcacgaaagtactttcgtgcagattcatcagccctttattacggggatagcctattgagacatcaattgcttttctctactaagtacgattaaacatcttgaaattacaggcataaccctaccgaaactagtgcacgaaacagccctatgaattatcaatgttctagaagtgagtgaatcgcccccctttcgtccacatatcttcaaatcgtttaactacttgacgcagcactgcttgttgagcccatcggcgcgatcatcagtgtgtctcgcccgaggcgattcctgaggaggttcctcgtactgtccttgattgcgagttgaaaaggtcacaactatgccagactttcccattagtgtgattgctatgtgaacgcggaccaatccagagttgtgactacaattcgtaaatgccatagttattaaagcagttaggaagaacactcgaagcctctggagctgcagtcttcgatgtattgtgctttgcaaacgttttgtcgttttgacttggagctttcctcgagttataataaatcgagatcgatttattgtgagaaccgatctgttgcaaccccttattagatctcatctgcctaattaatcagagtacaaatcaggactgaaatctaaatgcatcacttgacagctcgattgcccagtagaaggtgggcattctgctccaagcgcggctatatcgacttggcttccataaaaagatcgcctaatctgcacatccactcgcatatgcatcgcagggcgcgatcgatttacaaatcgatcgagctaaatcatagtgctaatcaatcgatttacgagcaaaataggcaaatgaagcggttttcacaataataaaacgagatcaaagatcgatctatttaggccgcctaataactcgacctacgccaatccaaatcagggttcgaggtcgatctcctggtggatttgagtagaatgaggttgatctacggtaaatcgatccttttcgcgttttcaaaagcgcaattcgaggtcgatctaagtaaatcgagatcgtccatgctaccctctctgatttgtgccctgatttgtggaccggccttcctcgatctaggccataaaaaggggcgacattttatctgcaaagcacaatacaacaaagataagatcgagatgtggttcaccttgtcgatcgagccgacatacagaagactggagtaattcctgtacatgtaggcgtagatgccttggtcaagttaaccacgtatctcctacgaaactacatcagattttagaagttctgcaccgaataaacaatgaggaagattcctaagagaagcctacgtcagtgcatgaagtagtgatgccactttagtggcttccttagtatttttatagacactgaggtcgtgacgcgaagtctgtgaggaagaggttaagcgattcgttcaacgtcggtaggtcgccggcgatacaggaacgacgccagcgatgaaagaggtgcgttgtcaggttccgtgatgacctacactggtgggacagagttcgttatcttccaactcactggtagaatgctttgcctcactggggtggctcggatgcgcgtggttgttacgcgttcccgaacagaagccagggaacctgtgtagcattaaactgttgcagtcgacgaagcgttcacgccacagacgaatgagcttttgctctccttatctatctcgaactcaacctcataggctatccccaccacctacgaagctcggatcaacatcgatcgatgggcgtgctcaagtatcggtcgcgttttgactatccagtagtcaggttatcccgaccacgtggtcaggaatctcgactcgggataagtgccccccccgcatcgccatcaagtcagcgtgccaaatcgtatgctgcatgataagaatgatggtctggtattgaagaagaagaaagttcgattaccgattatttgtcctctcaacttgcttagtagatgctaactatatgttgtgaactaatcgactagcgtctgaaagacgatacctgttcgatgattcagatgtagttggacgtggcgtatttggaaggtgtcggggtggcatcgatggaaatctccaaaagaactgctttcagccagcttcgtaatgatcttcttgagtttctgttgtttagacttatccgcacgtctcaacaggcgacggtagtgagcaccgaaagtattgtagattgcagtgatagtggtgtcgagtgattcggggtccttctcctcaaaacagtagtgatttcgttcggtccattgatggtgcagtatgatacacctgactatattccacagagatacaatctcggttcgttcttggtaccagcacgcagccaactgcggtaataccaggctgatccacgtgagatggcccacaaggaagcgactccagtccttccatatcgtggcccatacggcctttgatttcgcgcactccatgaagaggtgtttcgctgtctcgatgttgttgcaattcgagtatggacactgttacacggtcgggtcttgttgcgtaagaaaccagaagcgtgatcgtacaggcagtgggcgaagtgcgatacgcatctgcaggtcgtcgtaaataggcagaagttgggatctgtgtgcacgtccaaatcttacgaaagcaggtacgtcggctggggtcgttgagtcgaggtcttggcgaataggatgcctcgaagaatccgctgctgatggctgtagtagttgcttgagtttaggacgggggatgtacgggaacaaaaacgtttttgcggcgattttgatgcctacattggggaggtacatcgcttcggcacgaatatcgaagattcttattgtcgtctcaacgcggtagataacttgcatcaattccttgtggagactgcggagccatcgcttctgagtcgtcaatgggagttggatgttacctggctcgagagcccgccataaaaaggtggcaacggatgggtttttgccgatgtcgccgaaaatgtctttcatacaggaatattgcggctacatggagtcgaaagcttcttttgggctctgcaacagcggcgagatttcgtatttggccttgaggggtagtgtagtggaggagttggttctttgaaagccacaatggcgcgtacaaaagtgcgatcgcgctgcgttcttggcctccatcagctggccattgaactttgtgccacaatgtccatgcgtctctccaccattctggtagcgctgtaatgtcgaataagtatttgaacttgttaggcgaaatatcaagaaagttgagtgggtgcttcactgaaagcgagggagtgaaagcttcgaaaaatgtagacgctagttgcggccacgcctccttctccggctttccgagcggttttacaaactgttgtagaagctgtaggcgttgcagttttagctgcgtttcgaggtgcgggagctgcaccccccctgcctgccgcggcaaatacagtagttccgcgggggcgagttgaacaaacttggagtctgcatccgattttcctgtgagcacaaacttatttagcatccgctgccaccggtgtacgcaaggtggaggaaccgtggtgtgtggagtgaaatgccacagtacggatagaatcatcgtgtgcaccagtagaagtcttcctcgtaaggtcctcgctctccgcccccatacgctgaacccccgatagaacttgttgtttagctcgactacgatagtgtcgtgggacacatgttgcccgaatgggatgcccaaatacttgatcgaatcgtcagcgtaaaggcaccttacttcagggaatattgggcacggcatattcttgttcagtggtagcaacgcagattttctcaaattgaggcgtgctcccgaaccttggcagtagggtttcacctgctcgagctgctggcgtatgcagttcgtgttcttagccactaatgtagagtcatcagcaaaatacagacctgtgacggttgtatgttgattcactaaaacacctaggtcagaccgtcggcgaattaggttcccgagtggttcaatacacagtaagaaaaacagagacgacagtgggcccccctgcttaacaccccgcgtaacttgatgtggctgtagtaggaatccgttcaataaaattagtgcgagaggtttgttgtacagaagacgaatccacgagatataccggtctccaaatccgagaactgacaaaataaggaagagatactcccaaatcactctgtcatatgtcttttcaaagtctagaaacagcgccaacgcttcggagtttgaccttgtagcgtgatcccccagtagtcgaacgtggtggtgcagtgatcggccattaacgaatcctttttggtcaggatgtataatggacggtaagacgtcttggaggcggtaggtcagcactttcgacagaatttttacgtctacttgcataagcgtgattggacggtagttgcccggctcactgcgatcacctttagaggagagtaacgcatgacttcctctgggacggcaacaaaattccacggtctagatggtctggtattgtgctttgcaatgattttggcaatatgaggcgagatttgctgtatttatagcgaccacctgctagatttacgataaatcgaggtgcataaatgggtagaggcctagaattacgctaaaagcgccacaattgcacttttgaaagtacaattgtggctgtgcacctgcaattctgtcggcttttatctacaagtacctagacacacgacaattatgcataagagggtaggtgtgctggggatcatggacggcagtgtactgggcggcccaggggcggacccagaaccaaaatctgaggggggccgggccaaaaacaggggggtaagtctatatgcggctcaaaaataggggagtacctcgatccgacagctcagaaataggggggtaagtgtgatgtcttcccaaaatctgggggggggggcggtgccgcctagtttgtatgtaggtccgccccagtctgggccaatgtatggctgctgacaagctctcccaagccgatatatactagccgagcgccgccgctacgcggcggtgattttttagtttgttggcgcttcgctcgctatgctcgctccactattggagcaggctgcctacgcttcgcttggacccgttccgatcgcctcgtcggctcgctgcactactctcgatgtcaggttagtaatacagaggccggggcgggtcctagccgagcgccgccgctacacggcgacgattttttgttagttggcgcttcgctcgcaatgctcactgcgctataagagcaggctgcctacgcttcactacggcagtggcgatcccgttccgctcgcctcgtcggctctctgcactactctcaatgttaggttagtactacagaggttgggcggaccctgcggtcccgcaatatcgtatgatggggtcacctttggcgacggagccgccttcgctgcgctcggcagctactcgtacttagtggaattcgtacttagtgaataagcgtgacgatttgattcggacggacggacagcgcgttgctccaattgatgtttaggattgatgtttaccggaaaagtcgtattgatagagccccaattttctattgcaggttgcgctgtgctctatcattccgataattgtggtagtactgcgacaaggcgaaaattgctataaaacacggtagcatttacatcactttataaaacacggtagaaaatgactgatcgacgtgcgccgtgaacggttcggcttctccgagacggcaagcacacaacgcaaacctccagcagcagcagaagcccgacttccaaaccagtagcagcatgccccgcgaccgcatccctaccactacaccaaccgcttcaaagtgcgcgccgttaaagactggcgtgctgcacgcgctagcggcacgagccgcagagcgtttgccgagtcaagtgtcttctcccgcccttcgctacagaactgggagcgcaagtactcccgcctggcccaagagtcccagcgtcagcctcaagccagcccctacctccctccagctccctcccgtgcctcccgcctcacgctcagcggcagcggccgcaagcccgacacggccccgatcgaggacacattgtgcgtgtttatcaaggatgagcggcggctggagcacaccgtaacggttgatttcatcatcgacatggctacagagctcatgccggaggtgatggggcccaaaagcccggacgccaagaagtcctggtgccagcgcttcctgcgccggcaccacctcaccattcgacgcatcggccactcaggccgcaagactcgagaagagctggaagctctgcggctgccatttgtcgaggaagtgactgaggtagcgacgcagcattatatctttgaccctaatactagccccacggttgcacgtgcactgttcaatatagaccaaacttctgtgtactgggacatgggtacaaggacaacagtggaatttgtcggtgccccaactgtgcgctcaaccacaaacgagagtgaaggttaccgatgcaccatgatgctttccgtttcggcagacggaagaatttttccgccacactttgtttacaatggtgcccccggtggagacgtcaagaaggagctgaataagttttgcttagaagacgtggctacattttcggtgcaagagagcgcctggtttgatgagagagtgacgttggagtggattgagaagtgctggaagtatatcgttgtaaagccatcagtcctcatactcgatagcttatcggtacacaagaaagcggaaattgccgacgcgttggcgtgtacgggcacttcggtgctatacgtacctggcggctgcaccggtgttgcgcagcctctcgacgtaggcgttatgggccctgcctgtcaagcagcacatttgtcatctcaatagctcgcgttccgtccgacgaccgaagactgtaacgcctgcgtttcgtcggcatcagattttcgagcgtgcaatggaggggcttcgttgtgtttccgccacgacagttcagaactcgtttctaaaggcagaccctttcctgccgtatgggcctccaaataatgctgccagcgcgcctgcccccaagcgcagcaaccatgtagaccacacggacattgtagaagaggtaactgtgtaagcactgtgtaagcacctcaccgtgttttaatacgatgtacattttccctacattgcgtcctgtcgtgacctcgtccgtgcataatatggccttaaactatttactaaggcaatgtgctaggtgctctatatttccggatgctctatcaatacgacttttccggtaggatatgagaaggtggatttatcataattttagtaggtcgtgtatcttctttcacacatatttaggagcaggctttgccatatttagcgtctaaaatgatcggcaaaataactgaaaagcacaataacgtttgagctctcgcttgccaatcatccagccgagagacagagaagaaagagctctggtgcgaatatggccaacaagaagcgcaagtccacgaacttcgtgcgaaagatacaccagcgctcgcttctatccggggcggttcttgtgcattactttatgaccattcggcacagcaaaagattgacggtctgaaggaggagttgacacgactgcaagggcagctgaggcaattggaccccgtcccggcattgatttcagaaaacactgagatcttcggcgctatccgccagcaccaactgcatctcgccagcgttcaatccgccatcttaccatcgctggttcgtcaagtgcgcaaaactgatattgtaatggccccacaggactaacaataacactgctttccctgcaggaagtgcacccgctccactcgcggtttcacccgaaaaaagcgtgggaagaccgcagggcgacgctttggcgcttcggggcaagaattccgagctggatacgagtacattgcagcacgcagtcaggtctcgaactcgggccagccccacttgtcagacgaacggttcgagactgccaatggtgatgttcgttgcgacatattccagaccatccacttcccgggcgtgcgatccctaaaacaagtctacgatgctctgctctttagcctcgacaacgtcgagatcagcatttcggagcgcttgggcaatgtcacaatcagggacgactacgatgatgtcgacggcagcagcttaaacactcgaatcttgtccacgagtgacaacggggtagccacagagctcaactgtatcaagctgtcacagctcttcgaagggcctgacgatatctgtggcggacaactctgcggaatagttaccatcgactcggtggatgaggataaactttatccctacgcaccaagtgagtgacaggctccgatgcggtggggcctgccgtagcgaaagtgcgtggagttgttgtggttgcttgcttgcttttgggtaaaatgcaaagtgagattgattcctttaagtcttcgggctagctacaggctctaggtcttcctcttgctttctccttagtgtcgttctagaagctgagttaacctatactaaatgcaagtgtttttctgtttcgtaatcctatatatgcatctttgtatacttgtgcagacagagctctggattcctggcgccaggcagtcttgcccaagcctggcgccagccttcaagcgacgctgcgcacaagctacttgtggcggaggaggaggcggcgctgcgacgcctgccctcctagccaccaggtacgtcttccttgagcatgtctgttgctggcgtacccgcttgcgtgggtgccagcagcagacatgctgacaggagcgtattagaaaagaagtttccgcagcttttgttttgacggagcgtcggccgatgggtggtgacgctgagccgagcggcctacgtgaagcttcgccgtcccgagtttgaactttcggagtctgagtgggggctgttctggtccaatcgatgcgtagcgtgctgcactcaactccttgattgatttttagtcgctgtacttaagtacgtgttaaaactacatgtactctatcactcaagcatctttttactggtgggcatcaggtaggtaggagtaaagttttacaagtacttatatggctaggtctcttctgtcaaggactaagtacttctacgtattatatttgtttcgggtccctctgcccctgactttcgccgtggattacactcgaactccagccaaagcgccatttacttcagcgtcactttcagttccctaaaaactagcgagcgccactacagcatcaagatcaagctttatcttcccgcacttatcgcctccgtgtacatcggcagcgtcaacgccatcgctgccctcaacttcaacgcgcgcaacagctaccaagacgtttatcgatgtataccacgagatggtgacccacgccccattcgcagcgcactgatgctatccgataacgatggcaagttgtacatgtgatacaagccgagccgatttttttcacgaattccaatttctcgttcacacgatgacaacttgcggctctttattgaccctgatgttacttaggaggcacctttagaacgtcacgcatcgtcttcagcgctaagttgctccacagcgcaacatccatctgcaactcctgtaaagcagccttggacacaggaaattctggattgtgcagcttcaaaaaggtcactcggcgcatagttactaccaagccaccgtcttcgctcatacttgacgcgcttggatagctttcgtcctccttggcatttgaatcgtttgctgtaagcaagacagcgaccgaaatctctcttcgaacacgttcactggcgatgtacgggtgaagcgcatcttgatccaccgagtcaatggcaatgactgctctcggttcctgactagaccccttgtttttgccatcacacaggctggcgaagccgacgacattattctcgatacaaatacctttggtattccttgacaatatccgagcgttgtaggcgcagttttcgatctcgtcgtaatcttcgcgcagtgtgatgtggccgagttgctctgaaatgatgatctccatgttgtcgacatagaacttgagcgcgttgaacacgtgctcaattgaggaaaatgagccacctccacgcgaacacagcacatatccccctctaccgtctcaaatcgctcgtccgagtactgcggcaccatcgtgtcctctaacggacacgcagacgtaatgtactcgtaggcattcagcaacttctgaggtcgtatctccaaaagtgcggcccgacgctcagccgactccttgccgaggcagatgctcgtgctcaagggattccagttctgctcgctctatcataaaaaaaagtgtagggtttaggccctcctcccgtcgaacatcacaaagggatcatcgcacaccattcgctgcgtcaatagcgactgagctttggctacttgaaattgctggcttcttgcgattgcagcgagcgcagtgtgttgcagcatgagctgtgccagctccgcttcttcagcagatattgtcggggtattgagcgctgccaccttggccgtcagtcgcatcaccttcagccgcaggcgactgatctcctcctgcagggacgagtgacatgttacaaccatgcaatgggtgcttcggtaagtgaccgtcggtttttagtccttaccctgtgacccttacgacagtgagattgtccagcgcgaggacggctacggtcgggaagagctgctgcgcaattgtccataccccgcagggatcattggcagcgtgaggccaaagacagcctcctccaggcccgacgtaggcaatcccaatgccagccaactgtaggaaacgcgtgcgcatccgaaccgctgctggacaactccagaatacatggtagagatccactcggtcctgccgaacgcacaccgcatgaggacatccaacttgttgacgactgcgatcgtatggcgatagcgcctggtggttttgagccgaaacaggagctgctccccccacgggttaagaccgacaatgcgccggatccgtgaccattcaaggtgagagagacctgtcgcagccgaaggactttgccgctcccagtgttgttggcgccgcgctcgactggcgaagcctcgcctccgcgatgcagcagcaataatagttcgaaaatgtcgacgcggtttgatccatcgccgattacccacccataagcagaccagacgactgacacgcgggtgcggatgtacatactgaactcgaatttcgggcccgactgtcgcggacacgaacttagacagtcgaggatgactgctgataacgtggtcccgtgagagagccctcgatcctgacgtcagctgtacagatggtggcgaactggaagtcatgctcccgagcaccgggtggtccgctggtgctgcttcaatccgtagctccgagccgaagccacctcgataaaataggcgggggtaattcgtgaccaatagtagaacgagggcctccaccctcttgcgaattgccgatgtacgtcttctgcgggggaatagcagggtgaatgtgataagtccagctccatgacatctccagtgaatgatatcacggagccggtcaccgtacgtaagcaagcttcgaaagcatgtccggttggcgataactcctgttcggccatcgatcagctgaagatccaccactgaagcgtagggaagtcactccagacactgttgggcatggacggcagcttcagccaagaggaaagacggcaggtagtcgaccgtaaagctgccccgtcggcgactagccttgcgccgttccattgaagatcgacacatccgaaatgtcgggtcaactggtacaaggctgaaaccatcggtgcccgagcgggaaggtcagcagcgccacctgccgtggaaacgatggccttcccagttgaccacatagatgaacgacggcggatgccgcctaccagtgggactcttgcatttggggtcacgaaggtggccggagcacgggcaccaggtatcagctccttacacactaagatgtcgccgacgatatgatcgacattagatccgaggaccgtccactttgagactgtgactgcagccatcgccatcagttccacacgcagatcgggcacagccagacccccttgggtccggggcaaggctgcgagatccgcatccaaccaagccttcgccccttgtacttctgaggtaaaaacgccgtgccacacgtcattcttgatctttgtcgtcagccgattaaccgtgccagttgtaggccaggcatgctggccgatgtatagcagcttgggaataatgaccgctgaagcgatcaagctgcgttggtcgacggttgttgttttctgactggccatatacaatctggtggttaattgtcgctctgccatgctccatgtcctctcggggtccctcgtgctttcaacaaagataccgagatagcgtccttggtgcgcaggctcctggaaccgcaggggaggtggcaggcaggcgtcccctgcgggaccgtccggccgtagtgcaatcaccatcgttttcttgtggttaaggagaagcccagatgctgccccaaattctgtggtgaccctcaagagcgccgccacttgagatacagatgaaaggtagacagaacatagccggccactttgatctccacctcgccaccttccgacgtgagcttgaccccttgtaactcgggacgcctatcgagctcctggtacaaggcctcgagcgccaaaatgaacagtaacggtgcaagggggcacccttgcctgatgccgctcgtcacctcgactctgtgagacttaaaaccattagccaaaaacgtagcagtcgtaccagcatgcagagccccaaccgcctggatgaactgctccgggtacccgtggcgctggagtgccttcaagaggaagtctctggataacgagtcgtaggccttcatgaaatctagcagcatgaccagcgctccgtcttgagcagaatctacagacacagtctgctgagaggcttcaaagatgtgtaaggtctcgtggatcgtccgccccgggacgaagccattctggtgaggatgcactcggtcgtccaacgtctctcgcactcttgtcgctaggattctggaaaatatcttgtagtccgtattcaggagcgcgatcggccggtagtttaaaggattatgcagatcccctgacttcttgaggcagaatatatccgccaccagaaaggactcagggaacacctgccgcgtaccacttgttgagcatcactgacaggatcggtaccagttgatcagcgtaggaacggtaccagctattgcagagacgatcagggccagacgccttcccctctttgcaggccgcgattgccgcctcgatctccgctgtcgatatctccttcactacagcaacttgttcattcgtcggttccgcgacgtcctcaatccatccggcgactgcatcttgcgatgccgcgttcgtcacgtgttgctgcagtatgggggtccaggcatcagcaaggatgtccgccttatcgtgcacccctcgtaccggcgaaccgggggttgggtcgaggcagtgtatgatattgtccgtgaacttgctggagatgcgtctgaagaagtcccgagtagttttcccttcccaatgaattgctgcagcaaagtggcggcgctgatgtaaggatgccctcgctcgctggcagtcagcaatggcacttcggagccgggccgccggggtcgagccgtggatatcctcgagcgtcagcgcgtctagtgcatctgtaacggtctccatcgttactggttggccatcatcacactcacggatgcgggcttgctggttacgaagtcggcggagcttttggcggtaagtgttgcgcctggtacgcctccgttggcgggttatcttaagagtgtccgttacgattcggagcttgagttcgtcccaccacttggccatctccccagcctcgactccgtcagccgacacgcgctccaggaactgttggagcagtccctgcgtatgttgtttgactaagtcttcagcaaaacgaggaggggggggtgtacggttgccgccttgcgtacccggactgggtcgtccggctgctgtaaatgcaacttggcagcgtggtgatcggctgagaccgcaggggcgacgacttcccagccgacgacccatgcacgtagcagtctgttgacgtaccagcggtcaagacgggatgaagcgtccccatgaccagccaccggatagtgataggtgtgcgtctcggtatggtggcggcgaagttgatccggccgccattgcttgggtctgacagctgctaccggatcgatgacgccccatgtcacgagcagatttctgagagcaatagaatcatgcgcccccgcgcgcgtagtgtagcttcggtcagcctcctcgtccagcgtacagttgaaatcgccacccactgcaactagcgcgtcactcggaagttctatggttgctaaacgacggaagaatcgcttgcgttgggggatctggtgaggcgcgtacacgttgatgacgaccagcgggcgaccatttaggtgtcctctgaccgccatgaaatgctggctccactgatcctctaggcatggtgtcacgtccttgaactccccgtaagggtctaccaagatcgcgacaccagctttttttcctagtgctggcgaccagaaggacctggtggggcactgaggaccggtgcggaaaccccaaccagaggcaaataagtccgtgaacttctctacttctggcccttccacgtgcgtttcctggaggagaataactccattcctgccatgatcactttgcgttctgagactgcggaaccaggcgtcccggtcggaggcccgagctccaaaaccattcacaatttgcgtaacgcagccaaacgtttggtctgtaggatgcagtcctgtggatcgaacgctcagcgcgtccatgaccaccctctcttcttctcggagttgcatgagccgctttcggcggtccgctctgaaccggttccgcgtttgcttggccttcgcgacgcctgtgacgataggaaagaagtcgcccagacgccgttgtcttacttgacgctgtcgagactgtgctgtcgcgaaatagcccgcggcccagcgctggccccctctagcgtatccatgcctcgcccctctcgaagcggggccctctgataccgcatggaaattgcatcagaggtgttgtggcacattgtgcctttatttgcggcttggaagagcagcacggaacttcgatgtgtccgtcagctcatcccaattcaggcctgtgtggagcttgatcactgctccccagtttccttatccaatgcccatacaacattgctatccactgcgtaccagtgcgctaaggaaccgagaggcgctctccccattggcgtagctccccactgccgcacaacgtgtgggaacacgtgtagggtggtccatatcgagtccggcatcgaccgcggttgtccccgaaggtatttatccgccagccatttactgagggatgcccacccactatcagccgcggccatcttaagattgttcccgaggtcaggcccatttgcattttctagccactgttggctcagcttgcggaggtcagccgggcgatcttcatcttggctcagccttcccagagcttccatctgcgttcggtaagcttcgagccggccctgcggaaccgacttggccgccaactccgggaaaggtacaaacgcgaacaggtctcgaagcgcctcgacattgtcaccgtggtgcagcatgaagtgctccatcgacgggacctcctgacctggcgcaggaagtgaaaatctctcatacacctcggagtaccacctactaatagccgtcgtgttgtcatggtgggcagtctggagctttatccgcagcgctggggtcagttcgtcaggactttgtgcgtttagcaaggcctgatagacgcctgcgtggatctgacctctcggttgagaacgctgccgtggaggcatctcagcaccgacggccatcccgggaatcctcttgccgattgcgtagtcgtccatgcccgcagcggcgaaaatcctgcgttccgcttcatgcatcaagacttccatctcgtccacctgatactcgcagtcatccaaaatcggccaacacatgcggagatggacgacatccaagcgctgccgcatagtgaggctgcgttgaaggtgagcattggtatcttcggtatcgtcgagcaaatctagcgggatccctccgacttgcacttcaaacccgacctgcgtccggcttttctccccaatgttcctcaccaccacgtcagcaggcctggtgaggacgccgtcacgccactcaaatggatgcgcgacctcggccgcaaagctgggatcgccttccgcttgccatttcaggaagagctctccatgatgaactccatagaaatgactttcgtgcgtccggagcagcaagatcatggggaggacatgaagcctccgacacatgcgcagatatgccgtagcgtcgtgatcttccagcgccgtgtagctccctgtctcgtggatcagaggttcagagctgcccggtgtctccaattcatattcctggtaagtgtagatttgtacatgtccgtcaccgtggacatcgacgtccatgaccatcaatggctgtcggaggtactgagcataggtcctcagcacatgagggttgacccagttcgtgctgggaactcgggtatcgaccgaccggagacgttcatgaagaagataggtgcacacaatcgcgatcgccgcttccttagtcttggggtgctcgcagcccgggttcaggcggtcgagttccgtaaaagggtccaggatccccaacttgcagtcagcctgcaagttttccaccatcagcgcatagatcgcccgcttgtgaaagttggcgtcagcaattacttccggggtaagtggtaaactgccatgctcttggttcgataccgtcgcgtatagagcaagaatcgcacactgcccgttagcaggaacgttgacctccctgccttgaaaccaggacagccagtaattgacctgtgttgggtttgtgcgggggggggaacggttttctcgtagacaacactggtgtccgacgcctggctcgcatcggacgcttgactttcctttcccccaggcacccgctgagcaagctcgtccgaaggcaaatccgatgcgctggatacgatagagtaaggagcctccgagcctggtgtaggcgcaggaggtggactttgggatggggccgatgaaccaagatagctcgatactggggaggccgtctgagcaggagctggagaaaccctttgagcctctgaagaagaccttaccgaggagatacgtgaggcagccagctcaacgtactccgtgcgttctactgcatctgccacggctcgctggcggcgactggcgcgctgtgcactccgctgttgctcggctgcagacgtgtccggtggagtcgtcttttcggtcaaagcatgctcctcgccttcctccgcgaccatcaccacatcctggtccgtaaggacctcctcgtccgggaacgcataaccagcgtcgcctggtcccatgtcctgatcttcgtctccagtgtcaccattggcgaccgaggcaacatccgactcggacttgctgtcatcgtccatcagcgcctgatattggccgtattctcgggcttgctggaaaagtttgaaggacgtttggtgtccttgtcctcccggtgaagacgcggtttttttcttggcgggcttggggaccaagatgcgctgcgggggtatggccgcttcgctcgggtgtcgctcccttcttgttatcgaccgaaacggctggtgaggtcagctcctcctccgctggtgacttcttcttggatcccttccgtcgcacaatgatgaagtccccgtccgtcctggtttcagtcatcgcttgggtctgcactgcggtggtgcctgccctgcgggtttcccgttgtggactgggtgtggtccctttctcgggtgcgacagcgtctggctgggtattgcgctgtaacgttgccgctgtcagctccatctccttcgccatcgtcgcccaaaacgtgttgaaactgtcttcatccgtgtggcaataaggtcgcgccgcccctacctggaatggggccacatgtccctggaagatcctgtatccacgatccctagcatccatgagatgttccgctttgacgcgacagtacccggttgtatgcttggggctgtagcagcggccacacgggagccgttgttgaaccaggaagtggtgaagtactacctgcgttgctccgatagtaacttgcgtcactccttgcaatgcggctggacactgctcttgggcgaaacggactacgaagtagcggttatcaatcaccgttgtagcgtccgcgcgcgaccgttctgcgtcaagcactgggacacccgctagctgggagaatgcacttaccatcgtggcaatgccaagttccgccgccgcgtttagaatcctaatcgaataaaaacgtcggagctgagccgagttatacaccccatcttccagcccgctggagtcctccaggtcgatgactacccgttgtagacgcagcgaaaccccgttgtagaactcggccgtccggcgcgagtggaatacgaacttcagcgtatggttgccgtcaaaaaacagcattttgacatccttcagcatgcgatcgatcatctctttgccatgccttacgtttttgtttgagttgaatgactcctcgaagagcgccaggtggggcatgcccttgcgcagaggcacctgtgggggaatatccgctgtcaacgtagcctccacgtgagtctcatgaaattgttcaaccatggctcgctggaggacgggcattgtcgccttcagaaacaatggagggtgtctgaggtctagatcgccccggaaataggccattaacgcctgcgtctccacgggcgtccgctccctcagcatagagtcagagtgcacacgcgacgccttcagtgccgccgcctgaaggctctttaactcctccgatagctgaggcggtcttggggtcgtccagtctttctctagcgtagtggcgagcttcgcgagcacagcgggcggtaggtccggcttgagctggcgaatggttggcagcccctcactggaacgctcggccgcaattgccgaagacgtaagcgcggctgcgtacgttcgaggcgcagcgctagtcttggggagaggcaccggaaggctggctcccgaagacgtacgagcgcgtccgatggtgtcgtcacaggcggtcccgctgtgcgccctggttccgattccggcgacttctcaatcgcagaggagtcggctcgtgccttaccaagcaagccaccgtcccctgggtccggggggcgacgctgacgcggtccaccaggtggaggcgccggtccagtcacacacagaaggagggtcgagcccaccgctcaggtgctagtgcacacagctaacgggtggtcggtgggtggtgaaggcagcaaatccgggaattgcagagtgattgcaaaactgagcggcaaaatacgtcttacagtaggtgagtgattcatcaagctcaaagccttgacgaacgcgcatttccttgcaccaaagcctcgcttgaaagcggttgtggcgcaattccacactctacccgcaactgcttggtggtggtcccgggggcgccaacaaagccaagttccgtcatcaaactcaaaactgcattcgatggcattcggctggactatgtagaacagcaacgtaagtctacagtacacgaggttgaatatctaaataacgttcccgaaaacgccagcgcattcccactcaaatccttcgagacgcgacagcgcctgcctcggatcgcggcgaatcaagcaaatgcgaatgcttcacaaataatgttaatcccatattacacgtttcgcctcccctatctggcgccaacttgcacctcccggtggagttgaagatactacggagtcgtataaacgacgctgcgcacggtcttgagcatgacgtcgccccatcttgcaataccttcgtgcaactcctgcagcgcaaagggagacacaggaaactgtggcttgtgcagcttcacgaaagccgcccgccgcatcgtaaccactaactccgtctcttcttccccagcacaagccgccgttccgatctgcttgccccctttgtgcttcaccttcctcctgcccacggtaagcaccactgctccggaaacgtccttcctcactctttctctcgggttgtacgggtacagctcgtcttcgtctacacagtcactggccatcacagcacaggggccgacgcccacccccaactcgtccttcgcgaacaattgcgggaacgagacggcgttcatctcggtcgtgacgccgcagtcctccgtcgatgcaatcctggaattatacgctgttccctcaatcgagtcgtagtcgtctcgtaccgtaatatgccccagcctctcggagatactgatctccatgttcgtcaagtagaagatgagcgcattgtacacttgctccagcgactccacgcccctaaagtgcaccgtctcgaagcggacgcagcacaaatccccctgcgcggactcgaacctctcgtccgagagctgcatcttctcgggctgcgagtggctgctcctagctaagatgtactcgtaggcgttgcgcagcttctcggtgcgtctactcctcagcgtcgctcgtctctccgtccagtccttactcagccgtatacgcgtatacagcgggtgggtctgctggtctccgagacaccgagacagcagcgactgcacgttggccacgtgcagctgctgctggcgcaagacgctcgtgagcgccgcgttctccgcctcgcgccgctgcagcaccgggtcggccttggccgcctcctcgggcggcagcgagcgggccttgagcacggccacctggctctcgagccgctcgatctcctgttgcagcgaggcctgctcctccttgcgcagaatgtaggtcgccttgcgcttcttcttgggcttcacgggcttctcgggcgtggacgcgctcggcggagaggagtgatggtcgtctgaagacgtggatgcgctgggcagcggagacagctcctctaagtaaggcccactcacgtccgcgagggcctgcacgaacatgctgatggtcttgctcgcgtgtcgtgattggtgacttttacgatgtgttacgctataaataaggtaaaatggagcggattaacgcaaaacggagtcgggaatgtttgtcgccctgcggtaaggcctgcgacgtgtgaaagcgagtgtcgctgttacctgccagtgagtttgccctcgtcaacgtcaccttgcagcatcacggtccatgactcacgacgcttacgatgtactaagtaatgagaacgcaggggaaggagcttcatgtttctttcccagcaagaaaaagaagcagcccttacttgttatgcagtgctaaccatagcttgaatagcggtcggcagatttcaatggaaacggggcccagtagtcacaatcgccacttcgtcgtcgtctgttatatatatactatataatgagtccaactgcactcgcagctttccctatctaatcctatcagcggctagacgtttatttcgactatgatacttaagtattgcgttaattgttgaagcagcacgatagttgaaagctgcaactctaactgcatttcgtcttcgcacccaaagcgagacgaggtgttctacgatgcaaaatttgggtgttgttgtagaaattgttatcgcatgcaggccaaaaccttgctacgcgtagacaatctttcggacagctcggaaaacgtcgtcaccccaacctgtgacagtgtcttgtaattcttgggttgcctgctcggacacctcgaagtcggggcgacaagtcttcacgaagaaagagcgcagcataacaacagtcacgtcagaattgttgtcccccgtcaccttcttcatcgacaagcccgcattcctgcctcgactattttcctgtcgccctcttggtactacaagcagtacaaccgttccattaatcaccttgcggacatgttcatgggggtgataaggatgaagatcgtcttggtccacactgtcgatcgtcaacacagcataagggtcctcactggatctctcaaagtagtgtccgaatgccacgccattctgctccgtagtcaccccacagtcaagccctgaaattaacctgtatccgataattggagataaaactgcccgcgtcaactgcatcgtagtcgtctcgaaccgtaatgtggcccaattgctccgaaatgttgatttccagcgtatccagcgtgaacttcacggcatcaaacaccttccgcatcgactggaccccaggaaaggggatcacttcgttgcgcacacagcaaaagtccccgcttgcgtcttcgaacctctcctcggagaagtggggcctgagcgcgtccagatgctggcagtgcgccgtcacgtatcggagccctcgagcaatcctctcgtccttcatgctgagcagcacctctctcctctgcgcccactctcggcccaaatgaatagagaaccccatgggatttcgctcctggttctgcagccactggctcaccagactctgcgccgaggcgacgccaagctgctgctgctccacgacgcccttcaacacggagttcagccccaacgcagcgtcccgttgcgtgtctccgtcgtcatttttggtctgtagatgcgctagctgctgctgtagggaagaaaatttcttccctacagcagcttagatttaatctggtcctgcagctcggcccgcttaatacgtgcagggttcccagtggggtaattgtgggttgggtaaccccacccaccccctccgaacccagcctccgaattcttgggttatgtgttaatcctaaaaacgtatattgaagtgcaatatatacgatcaaattgtgccgtaaatgataaggcagcggttttgagatcggttatcacgggttttgcgttgtagaacgtccaaatggggttaggtaaactaaaacccataacccagccaccccatgaggtgctccaactagagttggtcaaatccttatccagttattaccagttaccgttattaccttcgtacttaccatttattaacgttaataacttttacgtatagttggtgtggcagaaatattcgatctgctaacggtaatacctcatgtgtatagttggtgtggcagaaatattcggtcaacgcgtttcgtgaagttgtcaacgtacgtggaggtttaccgacatgaatctgcgtatgctccacgtggcaggcagctcgcgcacggggcctattctcgtcgctgcattcgcaaacttgctcctgtagagcctgcaagctccatggaccaaaacggccaccgcaacgaggaccgggctagcagtgaaggtctggccttggtcgccgttcagttggcgtgtggaccgagtacattgtggttgtgccacgttgggccaacccgaagaagcagcaccgcgacgtgacgtgcaggcactgctccaagctgatcaagaatgcccagcccaagaaaaacctccgcccacacattcgcagctgtccctgcgccacagcggacgtccgggctaattaccctgtaacaccctccaagcgagatcgtcccgacacttccgataggccccacagtccatccaagcgttcgcggcctgaaatggctacgagtgtgctaggaccggtctcagtgactgaaaagaaggagttccatcttcagattgccaaagcgttctatgcctgcggcatttcgtttcgagtcatcgaaaatggagccatgaggtgtatcctgacgaagtaccggcccggaatgacgctcccttcacgccaagatttggcgacctcactgcttgatagcgcgtacgcggaggaagttgccagcgttatggaggtgctgagggagcagcagtacgttgccattgtatgcgacggatggtccgatcccaacagcgagtccattatcaactttatggcgacgtctccatttatccgacccatatgttggtcattggagcgctgcgccgacaaacagcatacaggggagttcatggcgtcagagttgaacaaggtgattcaagctgttgaaaatgtcgtcggaaaaggatcggtatgcgctgttgtgacggacaacgcgtctaacaggcgtaagtcatgggagcttctaatggccaagataccaagtctaacgtgtaacggctgcgcggcacacacgatcaatcttctactcaaagacatgttcgggatggagttcatgagtgacgtcttcaagaaagctgtcctagttaccaaatttgtgcgtaaacgtgcagcgcttctttatcgctttcgggctctgcaacgcaagtattttggtacccggcagcgacgacgcgcgctaatgatccctgtttcgacccggtggtactcgagcacaaattgtatttcccgtgtcgtgaggaacgaagatgtgctgcgtgaattgttttccaaccatgaatttctggctcgttacggagatgctgctgccaaactcaatcgcgtcgagtccattttggctgatagcatgttttgggtgaatgccagagccgtaatgcgactggtgaacccgataatccaagctctcggcgctctcgaaaaggatgggtgttgcctttcgatggtgtatgaatactttcgtggactgaaaacccacgtcatctacaaccgcgaaactgatgatgttgcttctggtattcttaacacgatccgaggccagattagctcccgctggaacaccctcaagcgcgaatcaatgctcgctgcatttttactggacccaactaagtctacggacgactttgaaggtgatgatttggacaatgcagtcgatgcatgcgtagatctagctacacgagttggtctaccctccaacgtatctccaaatgcggttcaccgagctgtcatggcttttattcgcgtgaagaagtcctggacagccgaagaccacgaaaaaaccgcgagggacacgccattagactggtggctggtcaaggttaacaagtttccgctcctacatgctttggctacccgcgttttgagcatcccgacgtcgtccgctgcgagtgagcgctcgtggagtgttcactccttcatccgcaccaagcgacgaaatcggctgaaacccgatcgcgtggaaaagctagcatatttgtactcgaatgcgggtgacaaggctgcaactagtgcagtgcactatcaagtcaatgcagaagaagagggcgaaagcagcgcgagtgacgactacagcgatgatgacatccttacgccaattgctcccaacagctccagtcgcatgcgcggtagtcggtctaatacggcgcaccgatcacgattcttcacgccctcgcagaccgaccgacgtgaagctgtcccacccccgctagctcgaagaacactattttcgcctgcactagccaacccgctacccgaccaagcgacgaataccagcacagtatgcagtgacgaggctgcggtcgctcttacgcagtcggtcgcccctacgcagtcagtcgcacttacgcagtcaacaagcagcggaaccgttttcacgcgtgctgatgcgcgccagcttgtgccaccggtcgtgaggccgcccggatcggcaagtgcaacaacaccgagtctaccaactagcgatagtctcgtattttcagggggtagcagcggccgtcgtggactacctccaactccacagtcgagcactggacgcacccaccactcgccgagggtgctctttggtccaacctgggagcattagcatatttgactttgttcacgctagctaagcccgcaacacgatccatattttcattccgttcacgccttcttgattacatatcatgcactagttagtcaatagagtcgtcgtcctcatgcaaatgtgtatcaatgcattggcttcaacctctttcgaatttcttctagatggtgcctcggctgatggtatttctagcagcttcctccgcttcattttctcgtgaggagttttggttctgctgcggacttgggtagttgttcatgataggggtagacttgatggtgcttgtcggacgtgacggcatacgctactcgagccttgatcactcatgcacgcagccgaggatgttcgatttgctcttgccggcctcaccaccctgtttcagcgcgcacacaacctttctgtgcttgtgcgtggtgaagctgcgtgtggacccgtggccatggcggtcgcagaacactttggtgaccttagtggtggcgaacttgctaggggtgaaggagaggtggagggctaaaccacttttgccctgactaatccgagttcaaataatgcaaacaccagctcttcttgttcttcttataatcgtagagcttcacatcagttagctcacatattcagtgcatcgtgccgtacccgccgaaacaggttgcccttctacgagatgacctcaacttgaacttctgtcactgagctgccagcgcaacggcgcacattggcacagcagaacgcgcactagcactcccacaaataaagaagcgtcatatttggttaagaatgcagtaataatgtaacatcaacgcttgtagcgcaacatttaggcctcgtccaacccttatcagcgagctgttcgttcatgtaacagcataatgaccacctcggcgatgtatatgatactcttcaagcccttctctctctcttacgaatctgcagcacaacacacaaactcatgagatccaccatatccagctacacgctctcccaccggcacttacttcatttttgatgaatccctcggccagcaggcacgtgacgtggtccacgtactgatggctaggcccgccctgcaggagataggtgttgttggtgccggactccgtagtgccaaagaactcgcaggtcctgtcgctcagcagtgaagcatcggcctcgtccgtcgtgaagcgcacgccgcacctgttctccttgggcaccatgtcgcctagtccgaagcaactgccggccacaacggtgtacaactcccgatgatgtagacgcccacaccggcggcatggagcgcgtgcatggctgacttctggccactgaagaagcgcaggtccttggtgaacgagccgtcgacctgcagctcgcccaccgacgtatacatggggtccgcgagggccaggccgagcgtcatgggttcggtctccgtcatgtccactagcatggcgcgtgaagagatcttctgtaggcagtctgagtagccttgtcgcagtccatcgtctcgggccgaaaagaagaagtgcaggtacacgatggcttccttgatgacatccagcgggcgtttgactactgcgttgcggaaccgttgctgatcagcttgaatgtggggcgatgtacgcgtcgtagagcaccttgggcctatttttgcgagccccgtggccagcgtggcgccggcgccgttcacgtcctggccgagcaacgagctggtgccgagcgacgcgtagatcgaggggagagattccagcctgggaccggagaacgcaccgcgcgcgtgcaggctagcattgtgtgggaagctgatatgagcaaaagcttgctcttccagaagttacaatgcttaagacaatatttaagtattaccatacacaaatgatacacaaaggtaataccatcgttattaaatgcctaaaattactaataccagttattaagagttattaacttggtaagaaacaacactagctccaaccttggaaaagccgggtaactgggaaccctgggtacgtggccttgcgcttcttcatacgcctcttctacctattcacccacctgtaagttgcgtaatgaaccggaatgggtgattatgggacgcaaaaggtgggtggttcaggctgacaatcattctgtagtttggtctctgttgaccagtcaaccatgacgctggcagaggaggtgacggaggtcgcggacgatgcgcctgccatggcaacgggaggcggcgctgcggacaaacccaggcccagacgcaagcggaaggccaccgggactcgacgacgggttggttttgctatcgtttcttgtgttgagtcgccgtgggactaacggtgtggtacttgtgcaataggaggagatcgcagcgctggagcaggaggtgaaggccctacaagctcaagtagctgggctgcagcagaaagcagaggcggaggctgctgccaaagcgtcggccaaacgctccgagctgcagcaagaaatgctcgagacgggcttcatccgacaagcggtgctgcagcagcaggcgtcccttgtgaacgtgcagtcggcattgtccaggctgacggtaagagcgacaatgcagtagccgtttgttgaggttatgtcgttgcttacgaaagtttacatggttttgcacgatagatgaccgagcctggagctccacacgcaacgagcatccgtctcgggacggacctgaaggagcggtgggcgactttgttgcagatgaagccgatcaagctgcaggcggcgcagtattactggaaagagagagggcgctttgtggatgacacgagtgcgttctcgtactccacgcggtttgtggagcaaggtggctgctactgcggccaggtgtacgatgtcgtgccgtttgaaggcgtgagctccgtcaagctcgtctacgatgctctttaccactacttcgctaacatgcagatccgcgttactgagagcctcggagatatcacgattcgtgaagacgacggcagttcagaacccggcatcgcacagtgccggttcgtgtcgtatttgtcgaacgggcctctgctcgaaatgaacaacattatatgctccgagttcacagaagctgacgacgagtatggcgacggaggtgcagttgggatttttaccggagactttgtggagcaagacgatctatacccttacgtcccacagaagcggattcgccaggacgccaccgttgtgacgcaggttcgatctcatgtaaagaaggtcagaaacgccaagggtgtggaggaagagcggtcgatcgtagtgatgcagcgctgggcctactgcaagattcactcgccgaaatggccgctatctcccgctctgattcacgaaattcgagagaaaagctcgcattaggatgacgtcaagctcgacgccgtacgagaacttgtctaccggtcctcctcgtgaatatacattgctttaaagttaccccagcccggacatggctgtctttgtccagctggccgttcatcaagcgcacttcgttgatgaacgcccaccaacccataatatcacccacaattgggtgggtaagtaataaaaccccacttcagaattccttaccgactcaagacaatgcagtctactgtccaccatgacgactcgagcgactcggagactgccgcgtcgcccagccaagtacaggaccacgacgtggtaatgatcgactccgacaccccaagatccctctcagattctgcagatagcgcgcccaccaagcctcggcgagtcaaaaagcccacgtacagggtgcgcaaggaggaggagttcctcctgcaggagctggacctgctgcaagcgcagctcaaacagctcaagaaacaggcggcagtgaacgcggccaaggcggagcaagagctctccagtgtacagcgagaactctcgagggaattcctcgctggggcctctcagcagcaacatttgtcgctggtcaacatctatcgggctacgtggtacgttcgttcgaaccaattcagaacttcctagatatttctttcattaactttattattttacttaattatttttttcttatgtgtagagtgtgcagcagcatgttccgttcgagatgtggatttatctggggactgacgtggaggagcggcggcagacgctggcggcgctaaaggcgctaaaggcgctgaaattgagggcggcgcagctttacgtcgtggaacgaaccaggtttttagatcccgcgagtccgtttgctgagcactcgcggtttatagcccagaatggggattattgcgccttgaggttcgatatcacgccgtacgaagggatctcgagcgtgaagacggtgtacgacgcgcttcatcactacttcagtcacatggagatctgggtgacggacattttgggggacgtaactatccgagaggacgatgacagcgctggcaagggcatctcgcagaatcgactggtatcgtcgctcactaacggagtggagttggagatgaacaacgtcatgtactcggagtttcgagagcacgacgacgagtttagtgacgggggcgcgtgcgggttcacggctgacttcgtggacaaggacgaactgtttccgtataaaccggaccgcttgcgctatgatgtgacggcggtgttgacggtcaaggcgcttcagcaccagaggcgaaacccggcaggggagatcgtgactgagccagtggttgttctcactcgctcctgtcggattaaacttcgccgcggggatattacgttgccgattgaaacagcacatgagctgcgcgaaagtgttggcaaatggggggatgtgatgttgcagactgtacgccagattgtgtatcgatgattcatgtttgcgaggagcattcaactgctttgaaacagcaaatgttggtatatagatggcaaaatcaataccagttgtaacttgaagctcttacagaaaccgctgagtgatacaagaagagtctggaagtacactgagtcgcgagtgattccttgtttctactcggcaccaggttggcaaaaggccatgcgccggtactcaggcttacggcagtgctcttcgaagtagacgacgtagcccttgtagacgcgtcgcttgatgggcttcaccagaggcctcagacccgtcagacccagcacttgcttgacatcgtacggagtcatgtgggcgtgaaaccaacgatggtacttcggtcggtcgatggtcgggatgatgaggtctctctcttcttcgtcgtcctcagcgcccggggtgacattgtccgtgtcttcctcggaggtcaatctcagaaatcgcttgtttttgtcgcggacagtttcctcgtgttcatcacgtgacttcgggtgcttcttggccgctgcaaccgtctcactgcacgccagaagagtggccagcacaatgaggagacagaaggaaacccgcattcttgtggttgaactactggttgagagttgaatgtgagcgctaggaggagaatttccgaatgccatctacgaactgagcccgcgatatagtatccaagctcatttttatctgttcgactgagccaggtatctgataccagcgccaattcctgctggtaggtggcatcaacagcaaatctttgacaggttttgaagtaagtcagcttccttggtgaaggaacccattcaccaacacttggctaatgcatgctgtagatcaaatggaagatgccatggaaagtcaaatcttgaggaagataccaagaaggcattgcgcttagccggagcctggctcatagatctttccgatctgcagtaggctccgctgcgcgaatgctggcccagctcaagcttatcagttgaataatttcagtcgggggactggagtcgagtcgctggatgaatacggtcgtttgtactactagtacttagtagaaaaatcggttataggcatctgagattatcttacagcagaatcttatgactcctgtagttttacttaaaagtatggaactacagtaactaccaggctcttgctctagtagtcctccacgccatcctcattctcgcgacagaaacgctggttgcgaggttcgtcgcatgcgtcacggtagaaccgcttgtagccccggtaaatgcggcgcttgatagggttctcaaacaggccgaaatcgcccaggcccaggtcatccgcaacatcacccggcgttttgccttcgtcgaaccagtcttcgtacttctcttcatagagaccatcaacaataattcctctctcttcgcccttccccgagctggacttgccggacttggcggtcgtgtattcatccggatcatcactcttcgtcttggtatcggcagaagtttcgtactttgacttctggtcgtcgtcggtaggcttagagtcatcgtcgtcgttgccctctggttgagctctcagcaattgtctgtcatcggtgacaccgccaataaattggcgctggacgccttggtcacgtgatatcaccttcgacaccttcgtgattttggcgctcgatgcagcactggcggcgtcattgcaagccaagaggccagtagtcgccaccagtacaagagtgtagaatcgcatccttggacttgggtacagtgctggagtttgggggagttctttgctctgggagtcgagttcgaaaatgaaatcagctatggtgtgggctgtgatggtctcctggggtcagtggactgcacagtcttgatttcgttactagtgcagtggatacaactagagttttggatgtttacatgcatacaaactgatcgacaagaagataatttggaatggcaaagcccaaggaaaggagcatcctcttatcgtttacatcagtagccgtattacgtgtatgcattcattcctcctggttgtgagtgcatccactacaactaaagcgaagagatctcagagcttttaaatttttttgcgaacaagtgactgtcaaagaagaaaatgtggagcagcaagcagttcctgtagtatgttgtgcgattatctgctgctctgatttactcctaagtcaggaacaaacctccatctgcgctttacacgcccgcgtgtgcccggcaaaagcttttgtatttgggcatacggcagtgttcatcgtagaacacgacatagccctcgtactcgcgcctcttgataggcttccagagacgcctgactccagtaagccccagcacctccttgaccgtgtagggcgtcattccggcatggaaccaacgccagtacttgggtcggttgatcgtcgaaatgatgaggtctctctcttcttcgtcgtccgagtcggcagcatccttgctggactcgaggtcgtcactgccatcctctccgcccttctcatactgtgtactacggagagcgcgcttcctattttcaatgagctcgtggcccgggtatgctagcgttgactccgagatagcagcggtatcaccgatcgccaagagacccgttgctgcgatgaggaggaggcaaccgagacgcatgcctgggcgtaggggggggggggttgtcgtgtggaagcttgaaggtagatttcaaagtgaactcgtagcgatggactctcaaacagcgagaagcaagtacgcaaggggaacttctcgtgagccgggtcgattttcgagtcccatacggtccaactccttcgagctattagcccatatatctgatctgcatgtggcttaacaccgaaagattggataatggagtttgcttcatggaaagttggatcaaaaggaagaatattcggaatgacaaatttggcgatctgcttggatgcacctagccggatattgtaacaaacgtaaatgtcggcagtccgggcacgattcacgtcacggcgaggaatccggactcgaagattaaattcctgagtgcaaactactgtagaacagtattaacaattaacaagtacttctgtgacttctacgaagtacatgcaaaaccattttactggaccgccaagagatcttcaggtacttttaagtctgaatctccgacacaacatcttgcccttcaccaacgagtggtgtcgttggtaaagggcaagattaatttaaaaaaagtctacttaaaagtaaaacttatttcgtaacacaaactgtcgggcccatccaaaccgtgtctgcaaaactgaacttacatttcgagcttactccaccatgagcagcatcgtccatctacccagactgtagggggaatgaatactgcagcggttcttcgaggctaagcagttgatgagggtttccgcattcatccgccgtaaatctataggcaacaactcctacagagtcaatctctatcttcgccacaacttgaaaaactattgtggacatgctaggaattcgctcactatgataaaagttgtaattaagtaagggccaaacaaggtagctatctatctaataatgcatttgacatgtgaggtaaattctggtcgctcttacccttttgtggttcatattgtaccagtcacaactcaatttaattgccatgatatgtttctgaatccagcaagcaacatattttttgccaagtctcagtgaaaacaaaatttgatcatgagcacacatgagaattcacacgctaagtctgaacatggtttcgaatagattggacggctaccgtgtaaggtaagctaggtaagcttagcgcaattgtgtgctgttccagaaaaaaaagaagcgtctctatatgattctgtagtcgatgagtacaggtacgtgcattatactagtcgttgaagctcagtacgtgttctcgcggtcgcgaaagaataaagaccgatgcatttatcgcaaaacgacaggaaaacaaagaaacgatcacgtaaggttaatcgattagagcacgtaagtttaatcgattagagcccctgatttaggggctctgaacgtcgtactgcaacaagctaagcttagagcgaaagttcaggtggtcagtcatctggcgccgccgctaaagtaaggcggtagtgaaacatcttttactaagctagcatgaaaacgtacgcgttagttcgcttaaggtttcggcctaacaagacttcgatccatatcgctcctcactcacgggtaaatgtatccctcaagctccttcttcctacgctcacgacgcttcttagcggtgtagtacgagtagtaaccgaggtagaaccgctgcagatcactcgcctgcttcggcgatccaatcgacaaaccgatcgccttggcgacctgcgtgggggtcattttcgccttgtagaagagcttgtagttggttttggccgcacccgcgcgctccgtcatgctctccagctccgccatcgccttgtcctcgtcgttcgtgtcgagctctgcgtcgcgtttcctcagaaatcgtccgttgttaccatcattgagggcggcggcgtcggctgaagtcaacttggagctcttgggatcggccacggcagcgtcgcagcaggcgaagagggcgagcgccgcaacggcggcgacgtgaagcagacgcattattgcagattctgggggcctctgtcgacgctgtggcaacaaagggcaaattgcgaactgatgacatgcaattggttcatgaggctcatgaatcatgatgagccaacgaacagcacagctcgacagcagcaaggcgtcagatggtcgatttgctttatcttcgggatcgaaaatgtccggatgtattgcagccgtcgctcgatcaagcccagcgctgaatacatactggggcggcattgacatgtgaggtcagcatccttatggaggccttagttggaacggcgttacggctacatgattacgacaagacgacagctcttacggcaccatagcaagggtttttccacatagcaaacaccacaccaagcaacgtagaggttgtatggtagaatatcgtgtccgttcggacatctagaatttcgcattacaatagtacactagcgcttggcctatcagaagactttctcatactttgtgagccaatcggcgtgactcaaatctcatgctgtgccgtaagtaacaaatcgggcaattcggacatatttagtccgaacatctgaaaaatatttgatatttctttagtcaaagccagtaagtcaaatattctgaaaatatcgtcaatattcgggcacgtattaattttaagggcgccagacagacgaggcagcataaccactcaagaaacgactcatgtcgacgaaagcgctcatacctgggaactcccagcgggctcgctcgacggctctcaacgccttctagcgcttcgcggtcgccgagggcttcaccgtgaacgccatctatgagtttgtaggtggggattcaactggcgatactctctccattgttctcgacaaatttgcagtgtatttagcatttaaagaaagctcgaagggctcgctgctatccaagaactcggtcgccagctactttggcaacgtcaagaaccacctactcgaactgtttccagctttaagtgctgtatcgggtcgtcggctgcaaaagattgcgtcaatcctcgacaagtactgctccaagcgaggcacagactatacgcaccaggccccaccgtgcacgaaaagcgacctgcgctcgctcagcttagcgatattgaagggggctgtatctgtgcaggactaccaggatgcagcccttctcaacattctttggtttttgctgggtcggccttcagacactatgtgtctcgtgaaaaaccaggtcgctgtttaccctggtaagtacttgtctttttattttccctaatttggtgtatttttaatcgtggtacacaggtgggtgtctatttatcacctttaagcgcatgaagtctgcctcgtatcaaggagcgtcgatttttcacgacccaaacgatttttcgtcttgcccaattcacgcactagctttggctacaattatgcagttgactccaagcgagtttctcatggatcaacttcctcgggatacacaagagctcctgccgactgaaattggcgaaacgccgctccgcgaactacttgatgtgcgtaccaggtccccagcaacctccaactctgagtcgccgaccccaaaaggacctgcgaaaaaagcgacagtccccggaattcacgcgtatgttaatcgcgtactgcagaagtggagtggtgtctgccaaaccgaaggtactaacctgacgccagggctatcatcgcattcatttcggcgtggagctgctcaaaacgcgaatagtgacagcaaaatcagcacaccttggattctagaccatggaggctggagcatgagtgctgtgagcaaagcgttcaattatattgttggcacgacccaggaagatcaaaccgtcggcaagtcgttagctggatgggatttaaaagctagtccgccgcttcctacactggacgacttcgatcctctggttctgcatcgaattcgcctacttcaagaccggcttttctcggctgcgaaggggttcacggagagactcagcttgcgagatgatgtagtggacgtacttaccgccaccgccattctccactaccccgacatgcttcggcttcggccagagtcactgtacatcaaacgggttcaagaagcactaaggcaggtacaggcgacagaggctgaaattactgcatggtcaatggctattcatcgtaccttacagccgtcgaagaacgacactccacgcagtccggcaccacggcatgttgaagacgacgaactcttgcggaggcaaaccttgctcttggagcagcaggcgccgatccttggagggctagcagccgaagtgaaggcattgaaccagcgggtgcagcggcttgagcacccatcggacgtaaccaccactccgtcgacaacagcagctggtagcctgtcgagttcgtccagcgctttgtcggatactgcaagcggcgcggcaactcgtgcgcattcgcgtgcgaagccactcgcgactgtgtggtacgagtggtttctgcccccgttgccaagcgcgcgtccaaaccggcggcgctatcacgagtgcaaggtggccgtggcctttatgcgggtttttctcccagccggatacaacgtgaccggagatgaggtcatagcaaagggacgcatcctgagctccggacggggccgaggcaaacgttcttgctttcctggaggctgagaacgtcaaagcaaagtcgcatggcacaattattaaggttttgaagcggatgtatgctccaggcaagctagacgaccgcatcaggaattaccagcgacttcagcaggaaggcaaggctcttgaagatgcaccggtgcatgttcttaagtcctacaacaatcacagcacaacgtaattgtagtctcgatccagtgttaggtcccaacacatagttacatcatacatagattaattcacccatctcgttacctacttacatgaagtgtgtgtgtcacaccatttagtcggaaaggtcggaggtcggatatttcatggtatggatacaactcgtcctcgtcgacaggtgatgcagccatgatatcgtaaggtccttcctcttcttcgtcgtcaaagaactggaagaacttgatggcgtttttctcgactatcagcccattcgagagcattgtcaccagtcgatggtgcagcataggattcgtactgttgctttcatggtcgctcgagtcttctctcacggtcaaatcttcgctcagctccgtcgtggtgatctccaagttcatgaagttaaactccaacgcatcaaacacttgtttgacgctcttgacaccgacaaactgatgcacatccaacttcgtagcaatgtagtggccctcgtccgtcagatacccagcctccttgtggaaaggtcgattgggattcgtcaccagatgcatcctttgcttcagaaactgcttcgcccgctctaactgatcatgtttcagtgcacaaacctctgaccgccgcgtgactgggtccttgctcaactggatgaaagtcttcaacgggttatacccgcgcagcgtctaccaatattcactaagattagtcgacttcttgccactccctgaattttcgcacgagcttaccgaaaactccgcgagcaccgactgagcaacggccatcgcgttctgctgcacttggatcatatctttcagctgccggttctcctcaacttgatgctctgttggtgccacatccttagggtctggaatccccgcctcttgacgcaacaaagccactcgagcttccaagaacaccaactccttcagcaactgcttcttctcttcctacacaacagtaaaaataaataaatatatcgcgcgagttacttagagttatggtggaaatatactggagctagatgaaggctttggcggacccttttggcgacgtggctgggcgttcggcctttggttttcttgcgcttttttgcgccggaagcgagtttctgagccgcttcgtcggatgtggagccgctgtcttcgctggttagtgcgcgcttgtgctgcggctcgacgctgatcaatgggtagaacgtctgcgccagagagaagaggatctcctccgacactcggccgtccatttctgatgttgacggtcgaacgtcctataatcagcgttgcgtcaatttacattgaaaaattgattgagatttaccgacttcctccgcttgtagtggacaacccatatatgagcgcccaatcatatcacaggatttggagggccttctcgactccgcttataagttccgcataaatcatttcgatacgtttccaccggtaatatatcggtgcgatggagcttcccttcatttcacgcagctgcggctgcagcctagagctacctggacgcggttgctgccagtatccactacctatgctagtgttaagcgctgctgcggcacacgtatactatacctatacggtacagacgttcggagagtggtttgctagcatcacgctgttcccatcgaccaatgacacatgttaccgagttagacttcaataaaacgtttacctcaaagatgttctaaagccagggcaaagcattgcaacggcactagcctcacgcgggcgcgtattgctcaaggctttgcaggggcagcctgttgcctgccgcgaggtgtcaagcgcgacaggctcgctcaggcggctagcggcgttgtaccaataaagtgagcaaagcgcaaaaaagtggcagctaatcgactactggtaccggtaccagttgccagattcggcatatgatttttgatgggtggtacagtgtaccggtatataccctgtccactataagcggaggaagtcggtaccatgacgagtcgtgattcacgacgcaattataattgtacaatgtattgtgctttgcaatgattttggcaatatgaggcgagatttgctgtatttatagcgactacccgaagtgggtcctccgacgttaactagccctaacatcagctaaataacgttgcaataacaagaatgacgtcgcccaaaaactaaatgacgcgtaaaatacgtgacaaccaaatccttcattccggccggattttccctcaggattaaaatactcatttgaagtgagggtttttcgattaatttcgaacttaaacggaaagaagctgtactttaggaaaagagggagaatgtcagccctctatttcagaaaaccagctcggaccgcgcagccacctcctggaaacattacgatagccctacgcgcccgctgttaaagggtggggcaaaccaagcgacttcacgaattacgtaagtttgaccttgcttcttacaggtgtgcattaatgctgcttgttatatgtgcattaactttggtaaattgttattgtttatttggtatgtatcaaggctgttaaggaggcggcaaaagcggcaggatgcctcgtacgggcaagctgaacgaattggcatcggagatggtcaagctgcgagagtctgcccccccctccctcccgcgaatactaaaggtaacgttgctctgcgctctattgtctgctaatgttgctctatgattgataacactgcttcattaatatttatgtctctatgttgttttgacgttggtattcagcttcaagctgcgcgctgcgggacgacaaggacgtgcgggccgagagggaagtccacatctagcagagtaccggactatcatcgttcaggtccctgacataatgactgctgcttcgagttgcttgtaattatgttctgatatttccgtacacctatacaattgtcgtcctaaacgtttgcgaaacatttgcgcccaagcgcttaggtttaatcgaatgaggtcgacactaccgagtactaacgttgcttctcaataacgttgcattatgattagcgttgcccattaacgttgctccaagataacgttgcgttatgtttagcgttgcgcattaacgttaatccaagataacgctgcttttttttagcgttgcacgttaacattgcccgttaatgtgacttgtcctacttcctctgttcttatataaagctagtgttcaaagggtacaatgccttccccaaggcgtacttatagttatcaaccgccaaactattcaattgtattacctgggtcagacgcatccgccattacatgatcgctataaaacttagcaaagtactttactataatgagagaggatatcactacggtgacttagccagcgcgtagtataggaagcatattaaatggaggcaggatcacgcatctgcatactttgcctatagatatattgagtcaatttttaagaaaacagcgatgtataccgtttgatttagaaccagatcgcaatctactttgatatcactgctattaaattacagcacataactgatgaggaatctgtttaacgcttagcatggacatgtctgctagaacctgcgacccttctggtagattaactgtgacgatacatttatgcatcacttcgataatgttaccctaggtgagtttgataatagatcatacgtccattcgttgcatgtgtcgatgtgtagtagttattgcacacagtaataagtaaaatataagcatgaacagctatggtttatcggctaagcaacaggcagcaattcaagtcttacgctgcttaagttccaaattttacagcgacgttaatagttcttgcgcaacgttaactgattttacctaacaattacgatgcgcgattgacggtagcaccactcgtactaagccttttacacttcatactgttaatatattgaagcctatttattgtaggtgaagtacacgcaacctggcaatgtagtcattcataatctggcggatgtactaagacggagacaatgagagtagtaaccgaaggtaatagacgtgcacctaatagttttattttatagattctgacacgactttacacagtagacgcggaacttccgtagtagacgcggaacttcagcgtctactattattccagattttctgagaagaggtcaactagtttgtaagagaataatttttaaactagtcaatgcacgatggtacagcattgaatgcacgtacactcacaatatcataatgttataaccagcgacgtggacctggtatgttacttgatttatcagtagggtttgctgccgtgcaatactgtcaccaacaacttacctcgaagaaagttagtgggcgatgtgatcgaagggcaacgttagcgggcaacgttactgcgagagcaacgttatcaaaagagcagtgttaatggttacaaaaaaatataatggtcacttttgaaacgcttttacaagcgcttgattagttatatactcttacaagaagaactatgtctcgttgtcgaagaagtacagcccagaaaaccattggcatccgcgataaaacgtacccatgcagagataaatgaatccgaacaccagagtattcacaatttgagcctctgttagcatactttgcgctcacaaaagtgtactcgtggtgtgtgccacttcagaactctcccaccctcacgtctgaagtcctcagtgagcggctcgatagatttgcgcacctcgtgagcctactatgtactcattcagcacagataatacctcagaaataaattaccaatgtgcaacacacgaggaatttatccgataaattacaagtccgaccttgtcctaccatgtacccatgttgctaataacgtcgcaataaggccctaacgttgccgtaaaagcgttgtgacgttgtaaaatgatgaccgataacgttgcaggaacgccatcccgaccacctgctagatttacgataaatcgaggtgcataaatgggtggaggcctagaattacgctaaaagcgccacaattctgtcggtttttatccacaagcacctacacatacggcgattactgtatgtataagagggtggatgtgctggggatcatggacggtggtgtactgggccaatgcatggcatttatgcataattttagcaggtcgtgtgtcttctttcacacatatttagtttgccatatttagcgtctaaaatggtcggcaaaataactgcaaagcacaatattaaccccttacttcccggctctctatacgagggtatatttttttaccgtcccgtatccaagtatattggtttttgtatgtgtcgccgcgtaagtacggatttggagagggtggttggggttgtgcgagagagaagacaggtggctatagtagcggctcctacaacataaagccatcttatacagccaaaatgaggcagtaacagtgcgtatgatggcgaaatcaacataacgaatgtcccggtcatcggagagcccatctttgcatcgttgcacacgtccagcagcgatggcttccgtgttgcagccaatgacaggaaagcaagagtaacgcattcattgattgcaaaccgcagaagtagagtttccattgattgcaagctaccaaagaacagacacactgcctacgacgattcgccgtctgcctcccctgcactttcatcattctcttcctcggcagcctcgctagccgacacctactcccgccgttccctcggactccgcgacggcgtgacgccccccttgcgcgatgcgacgtcacttcttaccagggcgcgagggtggcggccgattgcggatcttgtgctcttgcaggagcgccttcgggatgtcgttcccgttgctccagtcggtgtgccagatctggaagcaagttttggctctccccccgtgctatattacacagatacttgctgcatcaacacataacacgttagtctgcattacagaatcatagcagtagaaagcgctgccacgcaccgtcgatcgcccgtggagcactctgggcagaagtacttggtgaatttccttggcttcaccttgaggatggcgcccacctggcatgtgcggtgtcggcgcttcgtcccctgctcacagtcgactgtatctggttctcttcaaggcggtggtcgcaatccgctgatgcaagcccttcgtctgcagctgaccgctgcgtagctccatctcggactggggaagccgccgtccgttctcgagcacttgtcgctggctgcaatcaaaagcaacaacataacacgatgatgtgttggatatcagcgtaagcgtggacgcctatgttgaaccggcaacatatcacatacctcgattacagcgatcgcttccggagagtcgacggcgagtagctgctccatcagcgtttccagaaacgcaaagtgtttgggccgcttgttgttcacctttctgaagaagcgatagatgatgaaggcgttcaccagcgccatgtcaaagaagcccaagaagagggtcttgtagtacttgcacgtcttgtaggctagctggaaactgtagcgctgcatcctcagttggtcatgaacgtcgacgccgcccattgagcggtgatagtctcgaactatctctggcgccggaacagactgcatgaagccatgagtgcggcgcactgttgcatacatcattagataggttagcaatcgatccattgtagaaagtaagagcatacgtacggatggagatggtgcgtcgactgtctcctgtcgacagcatgtgcaccggaaggcggtccatccacatgactgccgtcaattgagggaactgcttgttctccgccagcttcgtggtcccctgcggaggcaccatcacttttcgcttgttcagctgcttggtcttcttcttcgtgatgacgttcttggcgtagccagaccggtccgtctggatcgtgccggtgatgtacagccggcgatgcagcagctccagcgccagcttcaccgacgtgtagaacctgtctgtaatcaccagtcgccacggggaagttggcggcggcgggcatagcgcattcatgttgcgcagcactgcagcttctccagagttgttgtccgccggcacgggcgtctgcaagtgcgccttggccccacagtacactttaattctggtagtatagcaatcacatcaataaagttagctttatgttatacaataacatttcaagccgctcttatgctggttaccatccaacataaagacttaggcaaaaaaaatcccgtgacgagtcggaactcgccacgggtcttctcacctcatgcagtaagctgtcttggcacacgcagcgacgaacaccttcgtcccccacttgtggggcttgtccttgttgaactgccgagtggggttgtatcgggaacgcgacggcagcgttgctccgtcgaagctgatgatgggagggacacggtaaccgcgggcgaaggtccgttgtagcacgtcgacgactggacggatcttccaggctctgtcggtcttagcgttcggagacttgttgttggaaaagtgcatgtagcccattatgtggaagaagcggttcttgctcatgaacaggctcaagcgattcgcaggcatggcgcccaccttcgccactgaccaatgcgctgcaatgcccttgcgaatcggtgccagtatcctggcaatgagcaggcccatcacctgcagcacctcataggcttcaatttccttgacaccagcgaggcgacgccgaatgtcgccgaggtcttcagcttcgccaccactcttgctgtaacagggttacacgcacaagtggctacagtcacttgtaactctaacagacacgacgtctgtttgaggttcgaaagactttctcgaccttggtgttgacacaccaaaggctacatacatttacggccaccacgacgggtggtccatagagacttaggattcctattggctgagagcagcatctcttagccaatgagcgacatgcatagcattggaattctgccaaccagccgttggcagatacctatcttagaatattacatttagaggaagtcagaaacataaaacaaaaatagcagttctcatcttttaccaaaaacccgctacttggagtctttatgttgtttaaagtatactcgtggatctcgagtatacttaactcaagtaaaagaaacctacgcttcctcatacacgtgcgcatacgtgtaagccgtagtagtgagccaaggtaggcccattacacttgcactgctgctttcgaatcgccctcgcgcgctcgggaatggactgacggtggtacgtgttgctcttcactgcaatctgagcccagagcttgggcagcatgaagtagaaccggagtgccaatgggtcttcgtcaacttcaagaacgctgggtgttgggccgtatgggccatcgtaaaggttggcatacgtggggtctggtccaaacttcaattcatctgtaaatagtgccaaaacattatgttagtaaatatgttggatacaaatacacagccgctcacttatgttgagtgagtcgaacttaccacattcccacccgatatctctcatcgccgtgatgtacttgctgtccttcgcggcaaacgatcacacagactcaggaagctcctcccgctcctcctccagttctttgtcagtcagttggccgatatcccagtcgccgtcccagctgccgtcgtcctctgcgtcttcttcgtcttccggttcctcgcgcacgtcgggatcttcgtccgagttgaggcctgtacaagcggcggccccgtcgtccatcaaattggggtcaccgtcgacaacgcaatccagtgaaacatcaacatgcgcgtccacaccggcagcgtctgcactgacatccgcctcctcacttgaatccacctagaatcaaataaacagtaagcttatgttagcgatatgttgaataaaagacaatatccagcacattatgttgccttcgtccagcatagcgtacctcttcatcattgtctccttcatcatctgcgctgtcttcatcaaggatcctgcgttggcgcttcttcgattccgttgtcgcaatgcgcttgcgcttgccggagctggatgtcttcgtgcctggccgagtgctgctcgtcacggagtcaggtgccgcacggggcgtcgctccgtccaccggtgtcgcctcctccacaatcgtcgccacaatactggccattgcgcccgcaacctccgatgcgactgctgctggtgcggtgtcgtgagcgcgtgcggcggtcgcggccggcgctggcccgctcctccacatagctagcgtctggtcaggcgccttcttccgagttggcgccttccgcgtcttgcccgtcgtcttcggctctgctggggctgccccctcttcctccgcgccggggactgcctccgcagctgccgtcgtcgcctccgccacggtctgcttcgcctctgcagacacgaggttcgccgccggagctgcattcgcagccgctgcagccatcatcttcgccgccttcttcttctgcgggggtgctgccgccgcagctcgtgtcctcgcctccttctcttccgcgcggcgtagtcatcgctccaggctcttcttcttctccaccggcgtgagcgtgtggcgcggcgtcttcccgacgggggcgaccattgtttgtctggcggtcgttttctcgaatgaggggaatcagtggccgtcggccaccaatttgatgggtggcattatcctttctcttgcactttggaaaaagcccgcaccaaaggcaaacctagccctgtacatgtgcccattttacacacagaaaaatatcttactttttgtataccaggataacgaaaaatgatccatacaaactctaagtgaaatttctgcttatgttgagtgatccaacatagcataaacgctgcgacaagagggaattagggtatacaccgcttatgttgagcgttccaacataaagtaactaaggggttaaagcaggcattaaatttgaaccctaaaaattcgggaataataatttcaaaattattattaaaaatttcctgaaaaatcataatgtaaatgtcgtttgtataggggtatttaattggccatccatgctacatacagttaccaagtcatctgctgtatccaatacaacaaaatcattgcaaccgattttctaattgtaattgttgacctcaattttctcaatctgtattgcaattgttattgacgcaacgctgctttctgtaccgtattgtgttctcagcactctacgtaagaccgttgactacgtccaaccggcccacggctacacgaaagacgacgagggcgacgaagactatgtcgaggaggaggtgattccggacgaagaggaagagatcagcgtggaggaagtggagaaggacgacgaggaggcgaagggcacggaggtggacaacgacgacgagggtacggagaactcggaggtggacgacgacgaggagggtacggaaaacttggaggaggaggacggcgaggaggcggagaacttggaggaggaggacgacgaggacgcgaacgaagtggtggcgaaggagacggaggaggagagcgtggaggaggaggaggaggtggaggacgtggaggatgacgagaaggcgaaggccatggggggcgtggaggacgacgaggaggcgaaaggcgaagagatggtgggcaacagcgccatgtccgccgtcgaacatgcggtcggtccgaacgagaaacaagtggacgatgatgacttgttcggtgatgatggcgatgacgacaccaccgccacgcacgtgaaggccaagtcggacggtggcatggctgctgccgtcatcgacgatgatgacttgttcagtagtgaggacgatgaagagacggtgaacgacgtggtgggcgaggactcggaggtggaggacaacgacaaaagcgctggcagcaagcggcaagtgacgggtatgttgtgctatgtgttgtttgcaatgttgagcgtttttgttgtacctcccaaacgtgggaaaggtgggaggaaggagaagacgcaggctgttgtcacgtcggcaagtgaccagccgccaccacgtcatcatgagcgccgccgcactaaaacgtgggaggagcgggagaagatagtcaaggcgcacaacgcagtcgacaattcgaagccacctcttgccaagaagtctttcgccaattggggcgagttggaggcagcgctcaatgcctatcaagatgcgaacttggtgctctaccgcgttcggagctcgcaatcgaaaacgagccacgacgggtacgggttatgttgctgttacagtatggtccttctatttatattaatgttgtttcttatgtagttaactgtgttgttaagtctacccggggtccaaaagctccccgatcacttcacccactagttcaagaagatgtggtgcacccaaggcgctaaacaatcttcgcgaggtgaaggcctacgggagagtggccagcggtacacaggctgcgaggcaagcttcactgtgcgctctgtcaagtatgttgaggaaggtgcgcatcgacccagagacggaggtattgttcgtatctatattttttcgagggcttagatgctaacttgtacaactatgcaccttgtagatctacatgcgcaaccacaggaccaccaagaccatctacaagtcctacaagcgcggcaattccctgccactaccagcagccgttcgcaaggatctcggtctcatggccgaggtgcaaaccagtacgccggcgatcaaccggtacctctaggacaagcgtggtgggtgttcctggtgaacgctctacttctggagttgttgatgtgttgttttttctagctgtttaatttgaatgggtattaacgtccttgtatttcgattgattaatatctacaggtatgatcatcaccctccagcaaacgagaaacatactgcaacaattactagggtctacgactctcgaacggacccgattgctgcttgatacgtttgttcgtgtcgatgatcatgacgttctgctggtgcaggatcagatggacatcacgtgcgtcattgcgatgcaaactgcagtgcagaaggcgtgcttcaagcaatggggcgacagtttagtcatggattggacgcacgggactacaacttaggctaccatcttggtttgtattatctcctattattttctatgtataaactaactcgcatactaatgagatgttattgtttgtcgatcatttgctgaacatacaggaagtcttgtagtgacgtcagcaactggaagaggcatttctgtggctgactttctcgcgctcgaccagaaggacgggaccatggaacgcattttggagtttttcaagcgtcacaatccgtcacggacctcaattgagacgttctcgattgataaggatttcgtggagtggcgagtactggagagagtgtttcctgacgccaaggttcttttgtgttaatttcacgcccttacgtactggaggaaggtttgcagacggccgaagtacaacctgacgatgtctcaacgcgagcggatggggcatgcattcggaaagctcatctactggtacgaggggattgaatattcaatgttacttgccatgttttactcaatgttgttctatgttattgtgttgttgactgtgttgctcgttaggttgctctgtatgtcgtttaccatcagcaacacagaaagaagtttcaatttagagctggaatcgtttacagaggtctgtgagaaggaatgtccagccttgctggaatatttcacggcaaactggaaagagtgcgactcgatgtgggctaactatacccggggaaagttcttctctgctggcaacactacaaccaacaggattgaatcaaattggaaccaagtgaagctgcttctcggcaaacgacctcgtctggatgcgactattagcggtctgttagcgcaccaggggactattgttcgccaagtgctcgcgacgatgaggaagcacgtgtcaacatcgcgacacccaggtgcaattcctgacttgttgacacgcgtttcagcgcgtcttagcgactacccgttgtctaaagtgcgctctcaatgggaccgcttcatggtgtacctggcggacactaagtgcacgaagctggacgctgtgggcgagtgggaactcagtactcggaggaatgcctacgtatgcaacgactatgagtggacgtgcacatgcctattctattgtagtcatcacctgccataccagcattagatgttcatcgcggatcgtgttcatcggttcgagtatctacctgagtcgactgtcccgcagcgctgggatatggtcgcaatgtccgagctggagaaagagcttcgagatggtgtcggagcgctacaagcagttcaagcgtcaatgaaagaagctggagattcctgggcgcgtgacggtctgacccaatacgacgtcttcctggatgggtccgaagcaacacaaggtgcaacagacgcaacacaaagtgcaacacagccaccaccccaacatgaacatgatgtagaagccgcagagaagatcgggcgccgccgtcgaatgcaacgtggtgttatttatgtcaagatgcgtcgacgagagcgtgccgacgttgtggttctctcatcagaagagaaatattgctatgctaaagctgtgttcgagcctgtgatggagcacctagcaggatcggcaaccccagctttcgtcgcagccttgaagtcctggaaggacattgttcgaagcgggttggagaccgttgaggcagattctactaccagtcctgacgaaagcgaggaatccgacgatcccgacacgtctgacaccgcatccgacatcacgccggctgatttaattgacagcatgaacttcgtccaggagttggagctagataaagcgggtccgacagcacggcttcagcctctaaacgagaggctacagcagaaaacaatgaagcaacattggcggcaacatcgagcaagactagtggggcaatgctaactaagtcggcgtcaatgtccaaggctacccctccgcttctacccaaagcaacgtcgccctctacgccgaacctgtacccaaccaaagcggtgttatcctcgaagaaaaagtgctatcctaccaaagctgccgtacgtgttaaaacggcagcaaaagttgcaagtaagggagggatcctggaggtgctacgtattcccaagaaacctaaggtgcgctacactacccgaaccaaactgaagcaaaccaagctggtcaagggggcgaaacctcaaaagctggctgcaattgtcctcccagacaagaatgtgccgtcgctgtcgcgtgttttagagtgggcaaacaacactattgaccgcaaccatgtcagcggaatcctggcaaactacccaaccatcatggacgacgacttcatgaactcgcgcgtcgctcacagcaagcgcgatcacgtctacactgacaactacgactacaactatgtgattccaaagaatctcgtcgtcaagttggaagccgcggtcaaagcggagaagaagaagcgatcaaagtctaagtacttcaaccaaaccgcggacgacaatcatccgaagggcactaccgaggagatcatcgtctacttccccggaggaaccccgcagttcaccaggtttgtagtcaccaagtttctcattatgttgtactatgcggtgctcacaatgttgcttgttatgttgttatgctttgtgttgatgtttggtactgctcagcgccgcagtgtacaggatgagcgagttttccaacgttgtccgcaaacttgatgcgtggaaggaggatgtgcattggctactgtcgactaaatgggacgcaatgacggacaatcctgagcttttcgacgtgaaaacggactcggacgagctcacagatgacaccacaggggccaagcacgtggccctggcaaacgaagtgctggagcagcttgaaggagcttctctgagctccacattctgattggcaagcggcgcaggcactgtaaagctggacatattggttgggatgcttactcgcaaggagatgctgtctgatacgatcattgatttcgctgtcagatatatctgtgacgcgctcggagattgctacgcgttggatacgtatgcagctacgttttgctgtcctgacccgccccagacccgcatttcgagcatgcattatgttgttttgccagtttatctgagcaacatacactggggtgtcatcattgtcagtatcacgcaccaggctgaaccaccgttaatcacaccctacttctacgagccgctgtgtgatccgcaatatcgagcgactatcgaagatacctacgaagagacggtagcgccatttctgctgggctggcacgagaaaacaatgattggagtggattatcctgttgtggagaatggtgtgtggctggatgcgcctagacagcccgatggaacgtcgtgcggcgttatggtgatagcccaggtgtattgcatgctgaaggataacttccgatttaccaaggccacagtttcagccgatgacgttgccgtcatgcgactacgtattatgtggatgatacttatgcaacctgaagtgagtacaatagcgaaccaagtagccaagaccgtagatgcaaccgacctcgagttgatggcaaccgtaaagacttgaatatagctcaattgtgacctcaaagcagttgtatttgttatcggcttgatgttttctttgtgctcacaacacgcgcgaaatattggtctagtcttgctcgagtagagcctcgaaacactgttgcagcattacgccgtacgacaccacgtagccggtttcacgcacagaccgttgcgagacggacagcttcctccttcacgttggcgagcattgtagccagctcgtcgcgctcgtttaaaagcttgaacgagtacttggcgatcttgtccagtctgtcttccatagcctcaattgccttgagcctagacatcaacagacccttgcaaaccttcgccctgtgagctcgcgatagacgcgtgcctgcgtcggtcgtgggcggtagcggtgagatcggcagagcatcgctgttaaggtcgcctggttccatcttctttcacgcttagtgtgcaccaacagccatttgattctagatgtctgctgtgatattctggagtgcgctcggtaacttttgcagtttccgtaattaatcgcagatagattaccgcaaacccagtcttacatagcaagcaccataccgtgcaggttcggacggctcggacattcggacaatatttaaaactaaatgctattaaatgctccgtgaagtgtggtgcacataaaatcttttgcaatcctctgtcatacagcggctgtttagtggacaacggcttggggactgcggccgacagcagcagctgcagcagcagcaagacgtgcgggatgtaggcgccgtgcgggacggcgggtcgtactgcggctggtcctcgcggggtggcggccgtcgaggccagcagcagcgggctgaggagggcgaggaggtggtggaggtggcggccagcaccagcaagacgtgcgggatgtcggtgccgtgcgggacggcgggtcgtactgcggctggtcctcgggcggggtggcggccgtcgaggccagcagcagcagcagcaggctgaggaggacgaggaggtggtggaggtggaggccaacagcggggtcgacgacatgagagggatgccgacggcggacaggtactgtgacacaaattattgcatgtgccctgtaaaacgtcgtaaaaaagtaattacactaaagtagctcaatggaggagctcccgaaagggtggttgtgggttcgattcccacgtttagtatcctattgctggcccggggcactgggttcctgatgtgtggtagaggcaacaataactcaataatcgtaattatgtttgcgcttatattcggctgtattatttaattgtttgcacgcgcataacagttatctacgcttgcaggtcttcgtcgtcgtacagaagcttcgtaaattacgggtgtacatgtaagattgtctgctttttgctacttactgactcactacttctagtacgtcttgcgtgtagccaggggcaggatcgcgaattgcgggagtctagagcagacgctggtggtgctcgatcttcgcattgagatcgcctgagcgatgaagcgcgcgtaagcgctggaggacagcgccggagccacgtgatgtgatgtcacgctccgcaagaaaacgcaagatggcttcttccgcgcgcttgcccaagtccaggacgcggtcgagtccagcacgaagccgtcctccaagaagagcttcatgaaggctaccagcagcttcgcatcggacttctgctgcttggagactgccgcctgccacatccgcggctcctgcgcgtaccacgcgaaccacgttgcgtgaaggtgagtggctgacgaccggcgctgcttcttctttggcttgctcacctctgtgtttgtgctgtcgggcttatttagcttggctgtagcttgtgcaggatcaccgtgtagcttggcctccagcgcgtccatgcgtgcgtcttggcgttgcgagtgctcgataaagtggttaatgacagtggcttggtgtcgaatgatcttctgggcttcggtatcttctatcggtttgctgggctgggttggtggttgctctgtggtgctggctttcttgttgcagtttgcggcgcggacgctaagtgagtcaaccaggcgaggaggccggcgatgaagctgccgctgtggacaacgcaagcttcgatacgcttgatcgcagcagcttctggattgagctccttcagtaccgggtagtgtcgaagcacacaagcggtaagtacatccaggacgggctgattgacattgtaccttgccgtctccaggtcttgacaggccgcgaacagaagtcgctgagccgcgtcgatcttcgtccgtgtctgagagtcgaacgccttgagctgctggattgataccttcgcctccgcatcccgaccgctgagtatcttgctgatcttgtggtcttgctcactcgtattgaagatgtagttaaatcccttgttggttgtcgtcatgttcgaggcgccgcagtcgaagatccagcgagccgtctagcttccggaggcgtttgcgtgctgagccccgccccgccgaaacgagtgcgatgtcagggccgcgacaacgccggcaggtttggaaatgcggtcgaggacgcggttgacgtgggtgtagatggtcggggtcgtgtccaagcccgcggacgtcggcgcggcaagtccaagtgtcgttatcgggtggtccagcatctccaaaagcggcacgtctggcgacagttctacggcaacctgacttggctgctcggggaagttgtcgatgacatcgggtggcagtgctgtctgcgtgatgattgccagggccatggccagcagcgggcaggtggcgaaatcggggtccgggaacagcgagaggccctgctcttcggaagtcttcatgcgtataaagcgaacgaagagcatctcaccagcgtctatcgacacgttctgcttgcgtagaagcgcgaggtcggaagcgcggccaaacaggtaccacaacaggcagagtaaggcagcgtcttggtagtcacttgagcaacttgcattaacatacaaatacacaagcattcttttcagatcgcgctttgagcacggtggagcctttgttataaagccaccaccatctctcttcatgcaaaagttgtcaagcgttttccccattttaagcaaccgtgcctcaagtgcagcacgatgctgtgggaactgttcgagtagccaaagtttagcttgcaggtagtattgcatcgaggtgtttcgagccaacggtttgccttttttgccctcggtaaatgcaagatacataccaaacttatccattacggatacgaaacatttaccactatcgtcaatattcatcacttacatcctcagacttcagaaacttctgaaacgtgggtacggcagttgcctttgctcgtttggtgttaccaggctctagttcctctaaccccatgcctcttgtcggaaagaagcaaaatatgcaagtgatacgttgttgacttatagtttgaatggcgatacacatatttttcagagtgctccgacccgatacgtcggaactgctggcttacaggactcccctacccctatcaatttctattggctcttgtggctggtacatctacaacgattggacaattattctcaaactacatgtgataggctgtaagtacatacaaacgtgtagtacagtcggataaccagccatattcaaccatttcttccagctgaacgccttcgaaaggatgtttcggcggcgatgaagctgtcgtcctttactcgcaagaagctgtcacaagaacgagatgggactgcggaggacgagctcgtcgtggtgctgacgcgatggttccaagtgcagctgcatcactcggagcttcaattcctaccgcacgtcctgcaagaaactcaacgccgcgtcgcccttcacggatcgcatggtccacagcatgaatcagtcgctatacggcgctccgtgagcgagagaaggcttcaacttcaaaactgcatgcacgttcgcgtggttatcctcccaaacgtctaaaatatttctacacgatagttttcatatgctcgggaaggaaacatgccttttacagggactcgaaaatgacacggtgcatgctgcggaccatggtatccgagaagcaggcgagcccctggcggatttcctgtagaacgtgaggcggaatgtccatctctgtgtggtgaagcttcacgcggaagaagcgcgtgagcaccaccactcgctcgaactcgtcgtcctccgcttcctcctcctcctcagggtcttgctggtatgggaagcctccgttaccgtacagagggtgtctggtgcgtgtctttctcttccggttcggcggcttcttgcagaaatgctccgtgaacttcatcgccgcattgatatccatgcgaatgcgttcatccgggacgtaagggtacatgtcgtccagatccaccgagtcggtcgacacgagcgcgtaggacgcgctcccctcgttgtcatcatccacatcaggctcgaccagctggaaaaacttgacgatgttcttctccactttgacgccgtgggccatcgtgctcaccagccgatggttcgagaacgagttgcttgccgtgctgtcgtcgtcctccctcactgtgatatccccgagcatctcggagatgctgatctccatattcctaaagaaaaactgcagcgcctcgaacacctggcgcacggatctcgcgccatggaacggcgtgttgtccattttctcggcgtaaaagtgtccttcctccgactcaaacttgttctcctggcaccagtgcgagatctgcgggaggaacttggacctctcggtgataaagtcgtccgcctgcttgagcttcatctcgcggatgtccacgagcgccgctctgcgctgcttcaggtcccctgtgaggtggatgaacgtctcgatggggctctcggaccgcttcatcaggtactcggccgacaagatggcgtgggcgttcctcagcagcatgtcctgcttcctggactcggcccggagtctgtcgttgtcttgggccttggcgatcagccgctccttctccatgaagaacgcgtcggggatgccgctggctctgcgcagctggagcacctgctgcttgagttgcacgagctcggcctccagcattgccttcttctccttgcgcacaatatacgtgggcttcttgtccctcctcttcctcttgggctggtccccgtcctgcatgtcctcctccctcacgggcttggcgggcctgccgggcctcttcttcttgatgataggactggagttgagctcctgcagctcctgcagctcctgccgcttcctcccgcgtcccaggggcggcgtctggtcctcggacgtgctgccggactcctcccggcctctcggacctccttcatagctgccgcggggccgcgcggactggatgagcgacagcaggttgtccgcggcggccgccctgtcctgattcgctctgggaggcggcggctgatgaagcggcgcaggacgcagcacgtcgtcctgggggaaggcggggcgcaggaaagacggacctggcgccggcgcgaagggcggcgggcgacgctgcgagctgccgccaccgaaggcgcggcgctcgtagagaaccatgctggggcacgaccggtggctgcttcttgagcagcgatgagattggggataattccgcattaggtgacctatactactgagaagaggtttgttataatggacagactactaattatctagttgcggaattgacaaatgggttacgaaacgtgtgcccataatcggcccaccggctctattatttttaccgcgcgcatgtccatggcgttcgtctaccggtacataccgtggctgacgacctcggagaacttttaactcgagtctcatggacgctcgccgcaatgctggcacacttgaggtctcttcgtcatgccatgagactctcgtaccggtagatgattgagccaaactcgtgttgacgggacgctgatgcattcccgtcaatagcactgcaatctgcggaggttgcatccagaatcttggggctgtgataccagtacaaatacagaactctgcctgaataccgaacgcctgatatatataagggctccaggtttataaagtgatctcagcgttaccagagaaacggctgtactgaattagtttatcttagacgggatttgacgcttgcttagttaatcaaacccgagtaaaacagtgctgagttgtttcagcgctgaccttcgaccaagcgtgttcacaccacatcagtgcggttagtagctctactttgtactactcctagagggcttagcgggtagtccacaaatgtgaaagtggaatcgtaaatacagagaagatcgcacagacaatcaatagggcgcgaattttcaaactgcacagcttagtacttttagccaaacaaaggtatcctggatttttacatcagtacctttgcccatctccgttcgtcctgttgttggaccttgaggtattatttatatgaggttatgtattgtatacccgttcggtattgaggcagatttctgtaccccctgcgtccgtctcagcgagagcgtgcgctgcatcccgcgcacgagctccttgccccagcggccgatttcgtgccgagtctcctccaggcagtcgtaggacacttgcagcctcgagtggtgcagcttgatgagcgaccagagcgtgaccttgaccaccagttcgttgtcttcgccaactctcccatggtgctgctcaggcatcccgaaaaataatattacccgaaaatataacagtattttcggatacaatactttatttagggcatcgccgtttgttttatccgaaatttatgtagccgagttctaaaattcggtattttacttctgctcatcctgctccaaccattagttgtggtcaaacatcgcgctctaccagcgtaactttgccgttagccctcactttcaaacaagcaccacccagcacgcgcatcacgactcgacgttagcaccatgaccgacaatctcctcgctggccccgctccgaggcctaccttctcgcccagacagattgctgccttctacttcaagccctgcctggacgaggagggagagacgacgggctactatgcctgcaagacctgcgctaagcgccgcaagcacgcgcccaagtcaggctacagcaacttggtgtcgcacgtgcgggcggcgcaccccaactacgagagcgacatgcgcgacgcaagtgtcgctgcgacgggaaccctactgccgtgggtcacccagaaggcctcgaaccgctacgcgtggctgcgctgggtcgtcacgggcaatctaccgctgtctttttgcgagtccaaggaaacgcgacagtacgtattttcatatctattttggtgatatacatgtgtgctaatgccgtatgtatgtagatacacgaagctaaatcccatctccgtggagacgctgaccgccatcatggaggccgtgaccaaagccgtggagacgatgatcggcgacgccatgcccgagcgttttggtctggtccttgatgggtggacccacggcacggagcactacatggcagtgtatggctgctttgatacggcgacaggcccccagtacccgctgctgtcgttagcgcccgtcatggatgaacctgacgaccagctaagcgctgacggccatctgacggcgattaaaaggttcctacccttttttggtaagtctgtctccggatgtctattcctggttggtgacaactgcggagtaaacaagcggctggcgaacctactcggtgtgccgctaatcggctgtgccagccaccgcctgaacttggcggtgcgagactacttggagccccacgacagcatcctcgaagaggtccagcagcttatgcgtaagttgcggactttaaagcaagcagccaagttgcggtaagtactctctttgctgttttattttgtttttgtattggtactaaattggtctttgtttttgggttttgttcgaaattagtgccaagaccccattggctgctgtcctcagacaagacacgcgctggtcgtcgaccttttcaatgctcagcgctattttcggctccgtccgttcatttcggcggacgacgaggagctcgcggacttccttccgtcacgctcagtccaccgcaagctggagactttgctggcaagcctccgggatgtcgagtccgtgtccaagcacctgcagggcgacggccttacgctgctgggcgctcgtgtcccttcgacgagctcctcaagagccacccctcgttcgcgaagtatctcggtaaggatcatcgctcactctgcgtctgatggtatttctacttaactactgcgttttatatgtttttatttatgcatagctaccgacacggatatagtccactccgccgtcttcatgcaggcggtcgtcaaggtgctggacgaccaggcggccctgctgacggacgacgaagtcgctgcgctagagccgttcaagcgcacgcaggctcatgtggaaggcgtggactgcacgccggcggacaagtaagggttcgctgtgcgtgcgctcaagcgacgcaaggtagctgctgcgccggccacgtacgagctgcttaatgacgttttggagaatataacgatccgagaggacgacgacaacggggacgacaatgtcacgcagctgagactggttacctcgacggggtcagcacccgaggcgccgccgctggagaccaactcgctgcagctcaacgagttccacgaggcgacgagctccggcggcccgcacggcgctgcgaccagcgagttctgcatcatcatggcggacttcgtggatgaggacgagctgtacccgtacaattcgcaggagccgatgcgcaaggacgtaacagcggcgctgctgctcacgcgtctgccgagggagaggcggtggcgctcatggcgcagcacagcgcgcgcaatactgaagagtctctcaaccatgtttgaggtaggaggaattgaggacatgatcatctcaacattcgcaatctgaacgagtgcagcgtcgaacacagctcgaacactgacggcacctcggaaatgcgatacagcgaacctcagcgcgcagtaggcgcctctggacgtctcgaaccgctcttcttcacagtattgtcgtcccggctcgagcccgcgacttcggcgtagtaggaactcgtgcgtcagctgccgtttgtcgtgtttcatggccaccagctcgcgatgccgctttttgcggtccagcccgagctttataaacgtattaatggggctgatgtcgtgttgctgctgcacgtagcctgacatcaatccctgtacgtcggccagcgtcgactgtcgggattgcacggcgtcgcgtagaatcacgttcatcacgggcgcctgcgtgtgcttcttgacgtgcagcgcattcgacacgatcgcctgcgacttgaaactctccagttggccctgtaactgctcgatttgtgccaacagctccatcttctgctccttgcgcagcatatgagtaggtttgcgctccttgcgctgcggcttggcagcgtctttgggctccgctgtgcgcttgccgttgcgttgcgcccgtggtctcttcgccgttggtttcgcgtcgtcactgctgctttcgtcgccgctggtgctcgtggcgctatggagctatctggcgtccgccgtgacttgcatcgcttgcggatacgctgctgttgcctgtggagtcattattctggtctcgggcggtccccacactactgcggtgggattgttcatcgccgtgacgtcgaagttgctgcccggcagaggccgtcgacgaggcaaagccgtcaagctgtagctggtttcgcgcgatgggaagccgcgggcgtcgcgtgtcatgccgtagggtgaacgcatcttgcttactgccgccgaagtgaggaagtgaagcgaagcgaggagcgcacttagccgtgtgacgcgctgaacgctgcgacgaacttggacttgagaccgaaagtcgtgcatggaaggggcggcgcttgccagcatcaatcaaggctgcaggaagctcgaggggctctcgacgatagcccttctgcatcgtgagcccgagactgtagacctatgtctacctgtaggcctgtgcgcattggaggtatcctcaccgaaatgaaattcaaaccgctagttctcgtgtattaggcaagaagtgaccattaccttgaacttacagtaccggcgcgtctacatgaaccagtaaaccaagcatttttgtcgagcaacgtccgactttcgtggtcatcacgataccggtatatgtccgcataggacttcattgatcaccaccaagcttgagcatcatgggccactcgactattgtgcggtggtatcgggacccgatacgggtcgacacggtcgaagctgcatccccgatgcttcacagtgacaaaacagttggtgagcagtctcgccagtagaacgcaagcccattgaaggcccagccgctggtgcgcagcgtgtcccattcagcttgcgattccgggtcccgcccgcctcgagcttgtcgcccgccatctcctgtcgagtccgttcgaccggcaccgctgtacggcattcgagaatcgactacaagtacatctatgcgggtggacaccagtggtgccaccaccgccacgccccaggccctcaccactggctagccagcctttatcagctccacatgatcgccgcatctcttcttcatcagcaactcttgtccgcgtaatcgcgttttactctgagagcggccatcctcctcaatcacaattttatacttcataaaggggtgctaattagtaaaacccacctattttgttcctctgcaatcccccaagctaccatccgcgtccaacacacatcaccgtcgtcatcattcgccttttacccaccacttggctctacctcgctgatgcgagtttaagcgactcactgcgctgcgctccgccaccagaatactctgcctatatataatacgagcgcgcgaatggatccgctcacaagctccttcatcgtgcagcaaccgcttgccaaacaccagcagcatcaactccagcagcagccacaggacgcgctcatggtcgtggacaaccgccagctgcaggtctggagcggcttcaacggttggccacaaccgctgcaggaccctcaccaccacggcgctgcagccacgttgatggggctcacagcgggcaatggtgcacttgcagaggaggcaccatcagcgacccattcgcccgcgtcttcggcttcgacctcgacaccgccacctcacaaacaggacgagcctcagaagcagaagaagaagcgcgtctttaagaagcgcaaggcgacgcacacgatccggaaggagcagaaggcggcgctggagcaggagatcgcggagcttcaggcgcgactcgaggagatcaagttccaggcgctcgtgcagcagggcaaagcggccaagtcctaccatgacagagccgtggagaacgcggtgctgagggagtcgatccaggagtcgcatctcgtcatggcgcaagtgcgcgcgctgctgtcgggccacacgcagcaccacctgagcggcgtgcggccgatggagaccaagatctgtctgagcgccgacagagcggaacggagagcagtgctgcatgcgctgcgtggagcgaaactgcgtgaggccaagcgcttcttgaacgctcggagcagtgaggtgaacccgaacacaccatacttccaagaagagaggtacgagacggcggacggggacttttgcgtcgctcgcttcgagatcacgccgctgcggggcgtgagaggaggcgtccgcgcagtgtttgatgccgtgttgcaggcggcgttcaatgccgagatcatcatatcggagacgtcgggcaacatcaccgtgcgtgaggacgacgacctcaacgacgacgacagtgtctcccagatgcgactggtgtctcggacgaacggaggaatgctgctggagaacaaccttgtacatttcaccgagtattcgcgcggagaggagaaggagcacgccgtcacgacgacggactttgtcgacgaagacgctctgtatccctacagaccgctcgagcgagttcgtcgggatcttactgctgctatgctattgacgtcgtatgagagcgagggtgatcccgcagtgctgatcacgcgctggtcttgtgctagaatctgccacacagacctcaacatctctcgcgaggcgctgctggatctgcgggagagctccattcggtcccaaggcatcttcctcaactgcgtgcgggagacacttgggctcccagtgagtgcaacctagagcaagatgttgtccctgtcattgcattctccgcgtggcatgttgcactttcatacgtgccgcgcaatccgatttcgtgattacaggcacaaaagatcactcagtaactttactaaacattgcaccacgtatagttttccagaaacgatatcgtcattttctggtaagtatccaatacacctgtatatttggatatccgctaaatttgaatcgtcccacttttctgaaacagtaaaattatcgattacattacttctcatacacaaatcgtcattcgcagttcatcactgtcgggctcaggtggcaccacgcactcgtccatcttgaccccacctagctgatcggatacccaacaccagcatgaatatacctctgttcaccccacgagggaactccagcatcctcgaccctatgaacgcagtgcagtccaccatgaccatccacggcagtcaaccgatttcgtcccgaacacgctccggcgacctgcagactcatgcagcctcggttatcagggcaccatccagtaccaagcccgaccagagcgaagacagcgacgcgccggggccggtgaagaagaaacgcgtgtacaagaaacgcaaggccacgcacacggtgcgcaaggaggagaagcgggcgctggaggtgcagatccaagctctgcaggccaagctcgaggcgttgaagctgcaggccctcgtgcagcgcggtgacgaagacgccacgctcaacaggaagatggcgcacaatgcggcgctgcgagacgcggtgcaaggtcagtatttgatgctgacgcacacgaaagggatgatgctgggctgcgcgctgcggcactcgtaccaggtgcgtccgacggagatgttcatccgtctgacggcagatcgggacgagagacaccagacactgaaggcgctgagagagcccaagttgtactacgcacggaggtttataatggagcggagccgggggatgcaccccacgaccgagtatttccatgaagagaggtacgagactccggaaggagatttctgcaacgtacgctttgatagagtaccgctgcgaggtgtgagaggggggattcgtacggttctggatgcgctgaagaacgctgcgttcaacgcggagatcatcatttcggagacatcgggaaaccttactatccgtgaagacgacgatcttaccgaagaagatttctctcagctacggttagtgacccagacgagtcgtggcatccttgtggagaacaatttggtccattttgcggatttctcgcgtactgatggagaagacagctacgcggtaacagcggcagactttgtggacgaagacgaaagattcccgtaccgccctcatgagcgcgtcaggcgtgacgctactgccgcgattttagtgatgtctcatgcagatacgaagacgaacaaggcggttgacatggatgggtatagtgatcatacggcttctgaggaggagggagaacccgtggttgtgatcacacgctgggcgttcacaaggatatgccgcaccgagctgaacgttccgatcgaagtactccgtgaaatgcgcgacttatcgggtcgagtgtcggagacgatactgaattgcgtacgcgagaccgtggggctggcaaaataggagactaagtagttttgagttgcatcgtgctgagaaaatattgactagaagcgcaagtttaccccaactttttttttctctttcttttttttcactcgaacgatggcaatgttgcgagtgtgtggtggagacgacaccaaccaacgctctacagtacatggtgatgaaaaaagtaattttgttcaagccagcagccaggcaaatctttgagcccttctgcgagcacccctcgcccgcctcatccggcgattacgctgaaccttagtcactctcgtttgtgcggcccagaacgcatcgcattttgctgtcgtcgtctaccagcgactaactcgtaccgtagtgaggtttccgcgtcacgatgagttcctcgttttgcacttcagcccaaagcgccgccctcacctcgctgctaggtgaaggttgggcactccctaacgacacagaagaccaatcgacgatttcgtgggaacctttggatgaattccaagcgcttgttgacgcggtgagagcgagtgggtcggatgcggtacgaatcgaggaagatccctttgacgctgcactgcacgcattaccagcgaagaagaaacgaaagtgcaccaacactgtgaggaaggaggagaaaacagcgctagaagcggagatcagagccttggaggcccaactggacgcacttcggttcacggaaatggtccagcgcggcgaagttgatccctcgttccactccaagaaagctcaaaactcgctgttgtggagtatcattcaggaccatcacttggtctttctttactctgcaattcccccaagaggatttgccttcaccacccaccgaccacccgttagctgtgtgcactagcacctgagcggtgggctcgaccctccttctgtgtgtgactcgaccggcgcctccacctggtggaccgcgtcagcgccgccccccggacccaggggacggggtaaggcacgagccgactcctctgcgattgagaagtcgccggaatcggaaccagggcgcacagcgggaccgcctgtgacgacaccatcggacgcgctcgtacgtcttcgggagccagccttccggtgcctctccccaagactagcgctgcgcctcgaacgtacgcagccgcgcttacgtcttcggcaattgcggccgagcgttccagtgaggggctgccaaccattcgccagctcaagccggacctaccgcccgctgtgctcgcgaagctcgccactacgctagagaaagactggacgaccccaagaccgcctcagctatcggaggagttaaagagccttcaggcggcggcactgaaggcgtcgcgtgtgcactctgactctatgctgagggagcggacgcccgtggagacgcaggcgttaatggcctatttccggggcgatctagacctcagacaccctccattgtttctgaaggcgacaatgcccgtcctccagcgagccatggttgaacaatttcatgagactcacgtggaggctacgttgacagcggatattcccccacatgtgcctctgcgcaagggcatgccccacctggcgctcttcgaggagttattcaactcaaacaaaaacgtaaggcatggcaaagagatgatcgatcgcatgctgaaggatgtcaaaatgctgttttttgacggcaaccatacgctgaagttcgtattccactcgcgccggacggccgagttctacaacggggtttcgctgcgtctacaacgggtagtcatcgacctggaggactccagcgggctggaagatggggtgtataactcggctcagctccgacgtttttattcgattaggattctaaacgcggcggcggaacttggcattgccacgatggtaagtgcattctcccagctagcgggtgtcccagtgcttgacgcagaacggtcgcgcgcggacgctacaacggtgattgataaccgctacttcgtagtccgtttcgcccaagagcagtgtccagccgcattgcaaggagtgacgcaagttactatcggagcaacgcaggtagtacttcaccacttcctggttcaacaacggctcccgtgtggccgctgctacagccccaagcatacaaccgggtactgtcgcgtcaaagcggaacatctcatggatgctagggatcgtggatacaggatcttccagggacatgtggccccattccaggtaggggcggcgcgaccttattgccacacggatgaagacagtttcaacacgttttgggcgacgatggcgaaggagatggagctgacagcggcaacgttacagcgcaatacccagccagacgctgtcgcacccgagaaagggaccaaacccagtccacaacgggaaacccgcagggcaggcaccaccgcagtgcagacccaagcgatgactgaaaccaggacggacggggacttcatcattgtgcgacggaagggatccaagaagaagtcaccagcggaggaggagctgacctcaccagccgtttcggtcgataacaagaagggagcgacacccgagcgaagcggccatacccccgcagcgcatcttggtccccaagcccgccaagaaaaaaaccgcgtcttcaccgggaggacaaggacaccaaacgtccttcaaacttttccagcaagcccgagaatacggccaatatcaggcgctgatggacgatgacagcaagtccgagtcggatgttgcctcggtcgccaatggtgacactggagacgaagatcaggacatgggaccagacgacgctggttatgcgttcccggacgaggaggtccttacggaccaggatgtggtgatggtcgcggaggaaggcgaggagcatgctttgaccgaaaagacgactccaccggacacgtctgcagccgagcaacagcggagtgcacagcgcgccagtcgccgccagcgagccgtggcagatgcagtagaacgcacggagtacgttgagctggctgcctcacgtatctcctcggtaaggtcttcttcagaggctcaaagggtttctccagctcctgctcagacggcctccccagtatcgagctatcttggttcatcggccccatcccaaagtccacctcctgcgcctacaccaggctcggaggctccttactctatcgtatccagcgcatcggatttgccttcggacgagcttgctcagcgggtgcctgggggaaaggaaagccaagcgtccgatgcgagccaggcgtcggacaccagtgttgtctacgagaaaaccgttcccccccccgcacaaacccaacacaggtcaattactggctgtcctggtttcaaggcagggaggtcaacgttcctgctaacgggcagtgtgcgattcttgctctatacgcgacggtatcgaaccaagagcatggcagtttaccacttaccccggaagtaattgctgacgccaactttcacaagcgggcgatctatgcgctgatggtggaaaacttgcaggctgactgcaagttggggatcctggacccttttacggaactcgaccgcctgaacccgggctgcgagcaccccaagactaaggaagcggcgatcgcgattgtgtgcacctatcttcttcatgaacgtctccggtcggtcgatacccgagttcccagcacgaactgggtcaaccctcatgtgctgaggacctatgctcagtacctccgacagccattgatggtcatggacgtcgatgtccacggtgacggacatgtacaaatctacacttaccaggaatatgaattggagacaccgggcagctctgaacctctgatccacgagacagggagctacacggcgctggaagatcacgacgctacggcatatctgcgcatgtgtcggaggcttcatgtcctccccatgatcttgctgctccggacgcacgaaagtcatttctatggagttcatcatggagagctcttcctgaaatggcaagcggaaggcgatcccagctttgcggccgaggtcgcgcatccatttgagtggcgtgacggcgtcctcaccaggcctgctgacgtggtggtgaggaacattggggagaaaagccggacgcaggtcgggtttgaagtgcaagtcggagggatcccgctagatttgctcaacgataccgaagataccaatgctcaccttcaacgcagcctcactatgcggcagcgcttggatgtcgtccatctccgcatgtgttggccgattttggatgactgcgagtatcaggtggacgagatggaagtcttgatgcatgaagcggaacgcaggattttcgccgctgcgggcatggacgactacgcaatcggcaagaggattcccgggatggccgtcggtgctgagatgcctccacggcagcgttctcaaccgagaggtcagatccacgcaggcgtctatcaggccttgctaaacgcacaaagtcctgacgaactgaccccagcgctgcggataaagctccagactgcccaccatgacaacacgacggctattagtaggtggtactccgaggtgtatgagagattttcacttcctgcgccaggtcaggaggtcccgtcgatggagcacttcatgctgcaccacggtgacaatgtcgaggcgcttcgagacctgttcgcgtttgtacctttcccggagttggcggccaagtcggttccgcagggccggctcgaagcttaccgaacgcagatggaagctctgggaaggctgagccaagatgaagatcgcccggctgacctccgcaagctgagccaacagtggctagaaaatgcaaatgggcctgacctcgggaacaattttaagatggccgcggctgatagtgggtgggcatccctcagtaaatggctggcggataaataccttcggggacaaccgcggtcgatgccggactcgatatggaccaccctacacgtgttcccacacgttgtgcggcagtggggagctacgccaatggggagagcgcctctcggttccttagcgcactggtacgcagtggatcctctggtggagcaatgttgtatgggcattggataaggaaactggggagcagtgatcaagctccacacaggcctgaattgggatgagctgacggacacatcgaagttccgtgctgctcttccaagccgcaaataaaggcacaatgtgccacaacacctctgatgcaatttccatgcggtatcagagggccccgcttcgagaggggcgaggcatggatacgctagagggggccagcgctgggccgcgggctatttcgcgacagcacagtctcgacagcgtcaagtaagacaacggcgtctgggcgacttctttcctatcgtcacaggcgtcgcgaaggccaagcaaacgcggaaccggttcagagcggaccgccgaaagcggctcatgcaactccgagaagaagagagggtggtcatggacgcgctgagcgttcgatccacaggactgcatcctacagaccaaacgtttggctgcgttacgcaaattgtgaatggttttggagctcgggcctccgaccgggacgcctggttccgcagtctcagaacgcaaagtgatcatggcaggaatggagttattctcctccaggaaacgcacgtggaagggccagaagtagagaagttcacggacttatttgcctctggttggggtttccgcaccggtcctcagtgccccaccaggtccttctggtcgccagcactaggaaaaaaagctggtgtcgcgatcttggtagacccttacggggagttcaaggacgtgacaccatgcctagaggatcagtggagccagcatttcatggcggtcagaggacacctaaatggtcgcccgctggtcgtcatcaacgtgtacgcgcctcaccagatcccccaacgcgagcgattcttccgtcgtttagtaaccatagaacttccgagtgacgcgcttgttgcagtgggtggcgatttcaactgtacgctggacgaggaggctgaccgaagctacactacgcgtgcgggggcgcatgattctattgctctcagaaatctgctcgtgacatggggcgtcatcgatccggtagcagctgtcagacccaagcaatggcggccggatcaacttcgccgccaccataccgagacgcacacctatcactatccggtggctggtcatggggacgcttcatcccgtcttgaccgctggtacgtcaacagactgctacgtgcatgggtcgtcggctgggaagtcgtcgcccctgcggtctcagccgatcaccacgctgccaagttgcatttacagcagccggacgacccagtccgggtacgcaaggcggcaaccgtacaccccccctcctcgttttgctgaagacttagtcaaacaacatacgcagggactgctccaacagttcctggagcgcgtgtcggctgacggagtcgaggctggggagatggccaagtggtgggacgaactcaagctccgaatcgtaacggacactcttaagataacccgccaacggaggcgtaccaggcgcaacacttaccgccaaaagctccgccgacttcgtaaccagcaagcccgcatccgtgagtgtgatgatggccaaccagtaacgatggagaccgttacagatgcactagacgcgctgacgctcgaggatatccacggctcgaccccggcggcccggctccgaagtgacattgctgactgccagcgagcgagggcatccttacatcagcgccgccactttgctgcagcaactcattgggaagggaaaactactcgggacttcttcagacgcatctccagcaagttcacggacaataccatacactgcctcgacccaacccccggttcgccggtacgaggggtgcacgataaggcggacatccttgctgatgcctggacccccatactgcagcaacacgtgacgaacgcggcatcgcaagatgcagtcgccggatggattgaggacgtcgcggaaccgacgaatgaacaagttgctgtagtgaaggagatatcgacagcggagatcgaggcggcaatcgcggcctgcaaagaggggaaggcgtctggccctgatcgtctctgcaatagctggtaccgttcctacgctgatcaactggtaccgatcctgtcagtgatgctcaacaagtggtacgtggcaggtgttccctgagtcctttctggaggcggatatattctgcctcaagaagtcaggggatctgcataatcctttaaactaccggccgatcgcgctcctgaatacggactacaagatattttccaggatcctagcgacaagagtgcgagagacgttggacgaccgagtgcatcctcaccagaatggcttcgtcccggggcggacgatccacgagaccttacacatctttgaagcctctcagcagactgtgtctgtagattctgctcaagacggagcgctggtcatgctgctagatttcatgaaggcctacgactcgttatccagagacttcctcttgaaggcactccagcgccacgggtacccggagcagttcatccaggcggttggggctctgcatgctggtacgactgctacgtttttggctaatggttttaagtctcacagagtcgaggtgacgagcggcatcaggcaagggtgcccccttgcaccgttactgttcattttggcgctcgaggccttgtaccaggagctcgataggcgtcccgagttacaaggggtcaagctcacgtcggaaggtggcgaggtggagatcaaagtggccggctatgttgacgacacggctgtctacctttcatctgtatctcaagtggcggcgctcttgagggtcaccacagaatttggggcagcatctgggcttctccttaaccacaagaaaacgatggtgattgcactacggccggacggtcccgcaggggacgcctgcctgccacctcccctgcggttccaggagcctgcgcaccaaggacgctatctcggtatctttgttgaaagcacgagggaccccgagaggacatggagcatggcagagcgacaattaaccaccagattgtatatggccagtcagaaaacaacaaccgtcgaccaacgcagcttgatcgcttcagcggtcattattcccaagctgctatacatcggccagcatgcctggcctacaactggcacggttaatcggctgacgacaaagatcaagaatgacgtgtggcacggcgtttttacctcagaagtacaaggggcgaaggcttggttggatgcggatctcgcagccttgccccggacccaagggggtctggctgtgcccgatctgcgtgtggaactgatggcgatggctgcagtcacagtctcaaagtggacggtcctcggatctaatgtcgatcatatcgtcggcgacatcttagtgtgtaaggagctgatacctggtgcccgtgctccggccaccttcgtgaccccaaatgcaagagtcccactggtaggcggcatccgccgtcgttcatctatgtggtcaactgggaaggccatcgtttccacggcaggtggcgctgctgaccttcccgctcgggcaccgatggtttcagccttgtaccagttgacccgacatttcggatgtgtcgatcttcaatggaacggcgcaaggctagtcgccgacggggcagctttacggtcgactacctgccgtctttcctcttggctgaagctgccgtccatggccaacagtgtctggagtggcttccctacgcttcagtggtggatcttcagctgatcgatggccgaacaggcgctatcgccaaccggacatgctttcgaagcttgcttacgtacggtgaccggctccgtgatatcattcactggagatgtcatggagctggacttatcacattcaccctgctattcccccgcagaagacgtacatcggcaattcgcaagagggtggaggccctcgttctactattggtcacgaattacccccgcctattttatcgaggtggcttcggctcggagctacggattgaagcagcaccagcggaccacccggtgctcgggagcatgacttccagttcgccaccatctgtacagctgacgtcaggatcgagggctctctcacgggaccacgttatcagcagtcatcctcgactgtctaagttcgtgtccgcgacggtcgggcccgaaattcgagttcagtatgtacatccgcacccgcgtgtcagtcgtctggtctgcttatgggtgggtaatcggcgatggatcaaaccgcgtcgacattttcgaactattattgctgctgcatcgcggaggcgaggcttcgccagtcgagcgcggcgccaacaacactgggagcggcaaagtccttcggctgcgacaggtctctctcaccttgaatggtcacggatccggcgcattgtcggtcttaacccgtggggggagcagctcctgtttcggctcaaacaccaggcgctatcgccatacgatcgcagtcgtcaacaagttggatgtcctcatgcggtgtgcgttcggcaggaccgagtggatctctaccatgtattctggagttgtccagcagcggttcggatgcgcacgcgtttcctacagttggctggcattgggattgcctacgtcgggcctggaggaggctgtctttggcctcacgctgccaatgatccctgcggggtatggacaattgcgcagcagctcttcccgaccgtagccggcctcgcgctggacaatctcactgtcgcactcacgcgggtgatggagagctgctggagaatcggagcggccctctattttcacgcagtgtggaggtggcgagttgcttttttcgacccgctcaataatgtatcatctggatatcttcaacactcgactgcggcacggatatgccactgtgcacctccacattgcccgaggtccacacgctcctatgcttgactgagcggcacaagtggcgcgcaaagcgcttcattcgattccggccgtgccaaccccagcacccgttgttggacgttcgaagtatctcctcttttttgatggcggctcccgtggtaatcccgggcctggagggagtggagcggcagtggttcgggtcggcgaagggtggggtgttttcgaaatctgctgggttatcagcatgtcatacgcggcaccttccacaacgaacaacattgcagagaacatggggctgcttatggggttaaaggcctgtcatcgccacaattggagaccactccacgtggttggggatagcaaaattatcatccatcaacagcagaagcggcgaccaccaaaggctaaacacctcactcagctatactggcaaagtcggcgggttgcggatcaactctcggtgatcagctggcagcatcacatacgcgatttcaacaagatggccgatgcgctcgccaacctggcgatgaatacacggcgtagcatgcaatgtaaacccactcgagtcatcggctccgactcgatctgggaagatcttcatgcctacgcagccagtgacgtggggcactggctggagcacatcagcgatgagaacgcttcgggattcggggccttcacaccttaacggttgggggcagccctgagtgtgtagccactaggggtaataaagcagggagatcggttagagacgacctccgtcaaggtcatcgatgtcgttagccacgaagttaagtgacaacaatgtacctcaatgccaaaacaaaacacaacaatcacttggtcttgaccagtgcgcaggcgatgctggtcgactcgtacaccgtgcgtccagcggatatgtacatccacctcgcggccgacgaaaccgtgcgtcacgtgactctgagctctttgaaagagccaaaactacggtacgcgaggcggtttatcacacagagaagtcacgggcttcatcccagtgccgagtacttcaaggaggagcgattcgagacaccggagggcgactactgcaacgtccgcttcgatcggaccgctctgtgtggcgtcactggaggagtgcgcaccgtgttcgacgccgtaaaacacgctgttttcgacgccgagatcgttctgtccgaggcctcgggcaacattaccatccgcgaagacgacttcatggacgacctggacaacttctcccagatgagactcgtcgcgcagacggcatgcggggtccctgtcgagaacaacctcgtccacttctccgagctggtggacgacagctgcgcgctggctatggccgacttcgtcgacgaggacgaacgcttcccctatcgcccaatggagcgcattcgccgggatgccacggccatcgcattgatcacgtcgcacaaggaaccagccgagtcagccgagcccgtcgtcgtcttgacgcgctggacgttcactcgcatccacgccaccgagctcaacgtccccactcaaacgctccgagccatgcgggatgtgtccatctcagacgtcatccgcaactgcgtcaaggagacactggaggtcaatctcccccaatagtcatacgcacttcaacttctctctcattggttaatacatgactccaattccagccaatgccatctcgccagccgctaaaaagctggtcccgtcagaacgcaatcggccatcatggcatccgttggcgcgcacttccctcctccggcctcgtcgcgccgcttcccgggctccttccagcgccaagacagcgccgaagacgacggcgaagcgtacggcgctgaccgccacgccgctgcggctctgcggggcttctccgttcgcgcaagagacgagaaacaagaaagcgtcaagtcggagcccttaattgagacttccgacgctgaaaccccgcccccgcaggctaaaaggaagcgaatttacaagaagcggaaggccacgcacacgatccgcaaggaggagaagatcgcgctggaaaatgagatcgcagagctccaaaaggagctggagatgctcaaattcaggatcatggtggagagcggcgaggccccgcaatccgacaggaaacgcgtcgccaagactgccgtactgagagaggcagtgcaggagcagcacttggtgctcgccagagcgcaggccatgctggcgggccactcgcagcagagtgtgttccgactgtacccgacggagaccaagatacggcttggaagagaccggtacgagaggatgaggacgctgagtgccctgagaggccccaagctgcaggaagcgaggcggtttttgatggagcgcaggcgcgggctcagccccacggccccgtacttccaggaggagaggtacgacacgcccggcggagattactgcatcgcgaggttcgacgtgaccccgtttcgaggagctaaaggcggcgtgcaggaagtgtttgcggcgctgcaacaagcagtgtttaatgcggagatcatcatctccgagtcgtcgggacatattactattcgggaggatgacgagctcggagacgagaatttatcgcacatgcgctttgtgtcgcagtctccccatggcgttccactggagacgaacctcgtgctgttctcggactgcagccagtgtgaagccaaggatacggacatggcggagaatgggcgctatgccatcatggcctcggacttcgtggatgaagacgagagatttccctacagaccattggaacgagtaaggcgagactcaaccaccatgaccatggtgacctcctatcgagacactgacagcgttgaaggtgaactcgttgtagttgtcacgcggtgggcgctgaacattgttcgacgtcctgcgatggctacaccagataaagtgtgggatgatctgcgcaattctcacgtgcggtgggcggatttgatgttcaactgcgtacgccaagcactcggactgccggtagtacagtaaacacgcaaatatatgagcccttgcttcagtcttttaagtgcagagttcagtccaacaaacgaacaccaaatacgcgcagacaacctacactagtaaccatcagaagggtctggaagagtttccattttctctaaaagggaacgccccacagctcacgtatgtaagcttactaaggatcacacacttcgcgcaatgtggaaaccaaccgctgggaacgacacatgtccatggcagtgactaacagcgtctctgggccaaccgctgtagggcgggggttccggaaattgaataggagccgtattgttgtcgaagcgtgctagttcctcgacgttagctccttgtctacacgcggcggaaacgtatcgtcgctcttcgacgtccgtgtttccacgagcccgcagaaaccccttggctactgtgaactgcaacagacactgctgtattcacctcaagtggcagacacctacaagccgccaaggctgtctgagagcacccgccaagacgactgcttgttaagtatcgattggccaccaagtacgaaggactatgaactgtacgatgaaccaagacccaacacagcggaggaagtcaagatcgtgctcaagcttgtcggcccggtggtgcgtaattaaccactcaattctggcagtgggaactgcatgatgcagtctctaacctgtgctggtgtctgcgtgtagatgataacaacactgctagaatttctaccgggttttgtggccgtcgctctcgctggcaatattgactccccatacgctcaacactacattgatgctgccacttgctccatcatggtaacgtagtcgaatccaccattgcagcgtctattaccgttcctctaactctcccctgtagctgattaatctctcctgcttttcagtcggattcggactggcagcagcactcgacacgctttgctcacaagcgtacggggccaagcggttcgagaagatcggagtgtatttccagactggagttgtcgtcctcggcgcgattctgctacccgtattcatcatcaattggttcacggacgaaatcctgctgctgttgggccaggacgcagaggttgcccgcttgtccgggaggttctcccgatacatgctgccagggatcccatttctctatctgtacgagctcacgcggaaggtgcttcaagctcagaacatcgtgacgccgcttgtcatcatcgcagcgatcgggaacactgtcaacattgccgcaggctatattctagcctaccacacatccatcggcttccacggcatcacaataggctgcagtttgggcaatgcggtacttccgttgctgctagcaccgtacttcatgtggcggcctcaccatttacgacagtggtggtgccaaccctggaacttcaaggctgcgactcgctacgtgggcgtgttcttgcgacttggagtgccagcgatgctgatgcttgtgatggaaatgtgggcgttcgaggcgctgacgatcctctcggggctgttgcctcatcacgaggtggccgtcgcagctcactcggtgctcgtgaacgtgaacctgctggtgtatacagtgttcgacggcctctcggtcgctgcaaacattcgggtgggcaattgtctcggcgctggattggcgaagacggcgaagctggcgtgtgtcgttgtgctgctgatgacactcgtcctagcactgacctttaccgcggtgctctttggatttagcggtcagatccctcggctgttcctcaacgcaggggacggtgctgatctcgcgtccaaggtgctggcaatatggtctcccctgacgatcgtagacggcctcaacgctgtaactcaaggcgttcttcgaggcgcaggcaagcagaaggctgctgctatcaccaacggcctggcatattacgtatttggcgtccctcttggggcgctgttggccttccagtatgacctcggcgtcgagggtctctggcttggcatgggatttggtagtgccgtgaattttggcgccatggccgcgctcatgctgtgctattggagctgggagaagcttgcgagcgaagcaaaagatcttacagacttgtaggtagttcatctcctatatgaccgtcgcactagcaaaaaaaaattcttgctgcgtagactgcatacagaactttaaaattagtttctttccagaccaaagctgaacgtaactttcaggaccagtcaaaataggatttcagttcgggaaatggtcccaacagcgagaaacagaaagactgaagttgcctcagcatttaaactgcgactctatcgcattacaaatgctcatcttgcactcaacgtcgcagctcgtagctgcacgcgataggttgcacgtgagtttcggtctcgctgaaggcgacaaaggttgcggccgtcagtgtttaacgcccgcaatagcacattgtgaacccatggcgcattcgctagatcgaaaagtagcgacatcaaactttggtgccgttaattactgcctgagatctggtgagaagcttgctgtactgcagttaaaacgtagttgagatagcgctcagtgtccgacgtgtacatgcttcaaactattcactgctcccgtgaaagtgtaggatgagttgccccttatccgccacgttcagctcggactggataaagcgcatcgatttcatgctgctatccattcacttgaaatgtacgcacacgctctgaatccgtagtgagcgagaaagcggtcagcaatcccagccagcgggtggcatcccgacggtgccggggtataggatcttccaggcgtttcccttggacaagtacggtatctaaaaccaacgcgcatgttacacatgctcgcattgagatgtggtatgtccgtcctgatggttggctggttgtcgagtgcttgtcgagctccttgccccacactgtggatttctccgggaaggtgatagtgtaccgatacctatgatccaggtgctggtagaccgaggcgaaggcaatgacagagagcccttcgttacgattacgtctccttcgtgtcatcgcgagcgctaccggtcggaagaactgaagctccagacgaccgaggaggtcaaaactctgctcaagctcgtgggacccgtggtgcgtgtatactgctcatctacccacacaattcttgcatttattgtacttacacctccgtttgtggatggtgacgacctttttcttgtttttaccggggttcatatcgatcgttctcgcgggtaacatggactcgcctgacgcacccgaatacgtcaatgctgccaccttctcgataatggtatgatattgtattttactcacacatgcaggagaccaggtcgtatcctaatgccgactttggacttgtgactctactttgaacgtagctgctgacgcgcatgtcgactgcggttgggctgggactcgcatccgcgctcgatacgctctgctctcaagcctacggagcgcagcgcctggataaaatcggagagtactccagactggagtcctcgtgctcaccgccaatctcttgctggtcttcaccacgagttggtacgctgaagaaattctcacgttgctgggccaagacgctgaagttgcgcgcttgtcggccagtttttcgcgctggatgctgcctgggattccgttcctctacgcctatgagctgacgcgaaaggcgctacaagcacaaaatattttgacgcccctcgtcatcatcgcggtggtaggcaacgctgtcaacatcggatctgggtacttgttggcgtaccacactgcaattggtttcgacggtattgcaattgggaggagtctcgggaatatgattctgccgctgtgtctgatcccgtacttcatgtggcggcctcaccatttgaagcagtggtgggtttccccctggagttccaagatcgccacgagtcacctccaagtgttcctgcaccttggagtccccgggatgctgatgaatgcgatggaaatgtggggactggaggcgctctcgatcctgtctggctttttgccggaaagtgtcgtggctgtggcggcccactcagtgttggtgaacgtgaatctgctcgtctacacgattttctcaggactttcggtcgctgccaacattcgagtaggcaactgcatgggcgcctgctgcccaaacaaggcaaggctagcgcgaaccgtagtgctccggatcacgtttggggtggcgtctacgtttgcgctagtactgtaccgcttcagcgacgtaataccccgcttgttcctttccgccggtgacagcgcggagcttgcctccaaggtgatggcgatctggtccccctcttacagttgctgatggtctcaattgcgttacgcaaggcatctttcggggagctggaaagcagaaatcggcagcgattacaaacgccttggcctactacggcgttggaatacctgtagaagtgtacctggcatttcaatgccatctcggagtggaaggcctgtggtttggcaccggaattggggatgttttggcggtcagtacgttgacggtactaatgttgtgctgctggagttgggaaaaactagcgaaggatgcgaataaacgcgtgaatttgtaagaactggacagcatccattgtgcaatggatgctgtccagtaggcctacatgtgcgcttctatagaagttctagcagttagatagccttacatgcaccaggatgtgagctccgtagcaccaaccatggagcgattgcgaagtccgttattgacgaatgcttggctataaattataacttataatgcgtctcataggtggcggcggtacatgtactgtagctgaccaccccagcagtaccatggcgtcgtcgtaattatcgcctggtacaacatggcacatcagtggcgctgtatgtgggaagataattacatccatgctttgtaaaagaggcattcggaaatttcatttggttccggctaaatgaaggaatcggtgggtagtcagtgagcggctgctactcaatgtaaatagtatttgcatccttttattttacgttcaggtttccagctctcatgataggccgtgtcaccttggagaaacccacatctaagagcaaacggaacgacgccgcacgagctggccacgtacaggtagtcgtatagcttagttgccaggcccgcgagcctcgatctcccagacgtgttcaacgcggtcgccgcggaaacccacaaggtggtcgtacatgttggtggtaggatcgcagtgcccaggaacgaggagcaactggctgccgagagctggaagcgttactttccccatagcgttgagctgaggcttcaaaattccatgctcatcgcctccgccatggtattcgagcgtggtggccaactcttccccaccaacgaacgagtgcaccagcggcgatccagagtcgagcgacaccgccttcgttccagcatcaacgacagcacgcggcaccgcagccttgtcattcttgctcatgaccgccgtcagcacgtacaaactctgcttccagtcgtgcacaaactctccgtcttgtccacggttgcgcgcgtagtcggcgtcattgaacaggtacgagcccggctgcacctcggtgaacactccgctggccgcttctagcaggtacgtgcccgtgcctccgcccgtcaccacgtcacacttcaagccttgctccagcaatgcgtcacgcacagtcttggccttctcagccacagcagcgatcaccttcttcttctcatcataactacgaatgtgctgcgccgcgccatggtacgcctggatgcccaccatccgcagtcgaggggcgaaggagtcgatcgtcttggccaggtggacagcttcctccactgtgtccactccgcatcggtcttggcccacgttcacctccaccagcgcgcggaagtggacgtttgtgtcctccgcgactttggcggcctgttgcaccgtctcgacgctgtcgaagatgagcgtcacttgggcgccgccctggaccagccgcgccatgcgctcgtagcgcctctcgccgtacacttcgttgctcagcagcaggtcgcgcacgccgccgttgaacatggcttcggcctctccgaccttctggcagcagagtcccactgcgtgagacatttgcagctgcaactgtccaactgaggaggacttgtgggccttggcatgtggacggatcgcgacgtgcggataagatttcagcgactctgggagacgcttgaggttgtcttccagagcgtccaggtccaccagcaggcagggcgtctccaaggacgagacaaggtcccccacgctgccaggagcacggcgaattacgcgcgatagggaggaggaggaggcgaggcgacgcacggagagcgccgtgattgcagcagcggccgctgcagcaacaggtaccgacgcggggcgccacatattttagtttttggccaagtgttactctgtttcaaaaaagtctggacatttttgatctgattggctaaggctaaaatatttgattgagccaaaaatgtgttggataatcaaactgaaagggatccatgaacttgttcaaaaacttgcgcataaatacacgtgctttgtgatacgtagatcgcagatttgaacctgtacaaatttttggtttgaggaaagggaaaacttcggaaggcgactcaaaataaataaaaaattgtgcaaaaaggtgggtgatacaaggatttgtgtcgtgtggacttggccatcgcgagcacaacacagatcgttaatgtagccaatgatgtcattagggcactgcgtgtacgaaacgacggcagtgccggtctaggtgtcgttgcctaccaataaatatactgccggcccatcgtgacctcaacgtcccttgagcccgcacagccgacgctgcacgaagcatcgccgacagatattgctgctttactctatgtcaccgctagaaaacaatcttgcggcttaatgccgtggcggctgaacttgagaagcgtatgccaatgtaatattggtatcgccttttgcacaaagattcaatttgagtcacgtttcggaatattccatacatcaatgatactgttatgagagttgtttcggtgagtgcattgtgaggatttcggttttcggtgagtagcgtgatcggctattgttgcagcccatcggcttcggcttgggttgcaagccagtgttgcaatctagtaatgtaaaatggtacagtagacgcattgctcggcttgaattgagagagattcgtagcgaatgcgctggagctctgttttgcggggggataacgtgacgggcggttagctaccgtcggtagcaccgcagtatagtgggttagtgagttatccctggttgtgtgggtgtcagcagtgttgctcaatgtgcatgccaaaatagttgcgcgtagtgcatgcagtgttgctccatgtgcatgccaaaatagttgcgcgtagtgcatgcagtgttgctccatgtgcatgtcaaaacagttgcgtgtagtgcatgcagtgcgctgtagaacacccttgcaacaggctgggatcagcaaaaaaaaccaaagctatccattgggccgaagtcattctcctttatacggagacctcacctcagtcactggcggtgtaggagctgaagagcctgactaaggaagaagcgacagcggcgatacgcaacgtacgggccccggcgcctgcagatgacgctcgcttgagcgcgcagtaggacttcaacttgatgggtttggcttgttactacagcgagggcatgcgtgtccagcaactttttttgtgaagaggttgttttgcagctgatcaattacattgatatttgctataatagcgaaatgagaagttcactaagtacttaagtgttcctcttgtttgctctctgcgatagcatataatgcagcaagtttgttgccgggtcccatcttttagacggtgacctcaggcattggcgggatgcatatttcactggaggggctgaagagcctgacgcggacgcagagtaaggaagacacaacagaggcgatacgcaaagtaggagccccaacctgcagatgacgggttagcatctgcgggaccggtcgttgtagtcgttaggaagaactaagtgacaacaatgtacctcaattcaaaaacaaagcaacaagtttgtagagtcaaccgaatccgctgtaagtttagctcgcaagtttgtgtgcggaagatccggatgaaatcttgttatgatgactaccgatacttagaagaccataaacacattttcttacagcattgtggtgggggcattagacaagttgatatcagtagctagcaacgttcgatacacaaggctggtaaagccatcaactagctacagtatgcttaatcctaaacgtagacctcggcttttgtggtacaatacgttttagctactctgtacacgactgtcgtccaaacggagacatctgcaccatttccagtccagaccggcgagatacgtcgcacggctctatcctcaaaaataattttgggtaggttgaattttgggttaaattggggagctccaacgcaagcgagattggctccggagcaagtgggacttttctattaaatcgcatatgaacttgaggggcttaacccctattcccgggccgctaggccagcggcccgccgctttttttattaggaacagtcgttatttgttttcacatgggcaagaaggcgtccgcagcactcgttgctgtgcgggacgccatcgccctgacgaagttccctcctgaattgcagcttccctagaagaagaaggactcacttttctcctcatggcacggccaccctacgctcgcctgggccccggagtgccttcgcactagccgcgttccaaaatgcgttgttgaggggtgtctgtgtgagccaaaagtgaaggagtatttgcagcggtacgtacacgacgtcgatcacaatactgttttgtattatgcaaggtatcgctgtaccgggcctcatacaacacgcacattttcaactatcgacgatgagtatctagcatcatcattagaactcttgctaggattcccttaccttctaacctatcaaacgggtgtatcacgcgagctgtttaactttgtttatgatagcatgctaacgacaagaggcatatctggggcaagcagcagcgtacccgttgtcgtcagagacgctattatgctctcttatctgttgcaggtgtcgaggtggagaagcgaaggcaaaaataaacaaactattcgcctcctatgctagtgtcattggagcaatacatggaagcgaatgcatgtcttgatgatgaggctcttcaaaagatatggctgacccagactgaaatatgctctcgtttgcttgaagcccacatgacacagtgcaaaatcaaaccagtgattcgtctagatcattctgaaaagttttgcagcaaactcaaagtatttggtgctcaaggtaagaaagatcaatcaagcgaggtacgtatgctactacttgcccaaaatgaaataggtcaaattgttgctcgtggcctgacgtactcagaaaatcacgttgaaactgcggcaattctaaaacctgtggccgcgcgattagcgtcagaaccacttgaatctcgcatctgtataaccgaccacgccaacggcacacgcagcctcatcgacaaggtcttcaacggtgcattggtagtcaaacaagaccctttccacgtaatccaaaggctcacagagaaggtaaaggatcacgtcatgcggggatggctagcgactgagctgtcctctgctatttacacggccgaccacaagatacgagagcccgaagaaatggctacactgttttcaaccgctctgggcaagattccagcttcaagcctcaatgtcaaagagcctgagtggcaaggatgcatagctagcaacctgaaccagatccgagtaggagatttatttgttggcaaggctgaatacgtcgagaatggcggcagggtacgagtactttcgactagtcagctcgaagcagttcattccaaactccgcaagctcttagaccgtattgtatcgtacgaaacgggccttcgtatactcgacatcttcctcttgcaggtaattgcatgcagataatattctactatatgcgtatctaatgctgtggtgtctagcacaatttgaaagtaggggccaagttcggaagaaatcctgagttttttttagtttgacttcttgacgatgtgccttgctgcagttttgggtcgcgagcaatttcctgtctctcctcagcttgagttcatgtacgagctaattatgcgccaaggttccagtttgtataatccgtcgtatcgtgctggagtatccagcaattacgagaacagaccatgggaaagactgagtgatctaatccgcctgcgaactgatagagccgaagggaggatgctagatcagcatgctccgactacagatatccggcggcttctcgtgcgctcacgtgtgaatcgaaagcagacctctcgagctgagtttgtaacatttcttcgtttggacccagaatacgaatccacaaatgaattctcctcacacgagttctccttgctgaaggaggttcgaggggagcaattggcgtcgagtcaaccgtggaatacgtgcgaggtggtcgcgactatactatttaactgtgctgttgaccagatcgacaatcccgcgctcgatcttcgaaagcgaagttttagatcaatctctcgtcgcctgtcggccgttgacgagcagatagcacgaagccccgcgccaaaagcaagtacagccatgatccctatcaccgtgaaagctgttgatgacagcacctcgtccggagatgaacgagtgttgcaggaggaggtattcacgatgctacgctactcgtctgagaaggtgaagcaagtgtactacaatgtgtaccaattggcgtcgtgtgtttgtccggaaattagaccgaagtcgacggcctggttgaaaaagcgttgggagtcactaggtaaacgacagttgcgccgaaatcgtgataatgaaggtcaagagccgaccgaagtggcgaatgcaccttcacctcgtctacacgtaggcctgaagttgtcgaacagcgaggcgagtggtaccgcgttgcgcgagcctgtacttctcgctgccaacgcgcaattggctccagagactagttgtaaaagcgctgtcacgaacggtgaaacgattgcgtctgtagtcgctgcagtaccagggtcccctcgtgtgctgcccgaagtcatggatgctgggaccaaacagcacctgcgaagttatgcggattcgtttgaaaaaatacacctggaaaatggaggatgatcttcgaggaatttcaacgtatcaaacctgggtcgacactgtccatcaatgctctccgctgtcgccttgaaaatcggtccaaaaggcggaaggtgtcaccagcagctcagtccgatgcagctgctcccaattactccgaagaaccctctccgcgcaagaagatgataatccagacacagccaaacgcaccaaaagactcccgcagcagtgatcagcacaggtgcgtcgtccctgcgaagtactcaaaacagtcagcctgtaagagctgctacgagttgaaacaaagatgaggtccatcaggcaacaacaagtactgtaagtacaaagctcagagtgggaaatcaatcagtgcatattttacgtcagcctacgaaggctctacatgaccaacaacacagaacaaatgaatacaactgatcaattagtccgcttagaaccattagactacggtacagtacctacggtaattagtctgactgagactattttttgtaagtggtgtctgggcttatttacattaaatagtctgactgagactatttattgactaagactatttatgtagcacgaaaatagtctcacctcttattcacctggagctgtactgctcttttgtgtatctggagttgaagtcacaggctcgccttcgaagtgggcacgatgcttcgccactacatcttggagatgaggatagagttgggctacagaccaggttccgtcgattccaagcgacaatccgcagcgaatcatcgcttttcgagcgtaggacatgccgttcttgtctttctggtgattgacatctctgactgcgtcggctgcaagctgaaggaaaaacgttttgccagggttttgaagcttgcccgaccacgacccgtccatgcgaatattattttgccaacagttctccttgatcagactcagctttttcgcgttccaccttgcgtcttttatcttcgcaatgatgaaggaatctgctggctggcacaagtcggtggcatttagagggaagaactggagatctgcattgattgagttgagttcatcttgacattggtcggcttcgagatggccagagcagttgtcgaggtagatggtcttgttgcggccatgtggatctgctcgcattgctttcctttcactcagatactctcgaaaaagtctttgtgtcatccatcctttcttactggatcgataacacacgcccggagtgtcatcgggtacgcctcggataggatgtttcccctcagcattcataaagatcatcattgagggggggggggattcttgcgcttgcacctcccgagagccgcaccaccatgatcattccttcgccacccgacacgacgtctgcatacttaatctgtttttcgcctgagaagcccaaagttattccattgtcgaaatcaatgacaaaatgcgtctcatcaatattttcgattgcattttcgtccagtgacccgtcggcaaacccacgctgcaactctccaaggtgaaatgcaacctctttctcgatatgcaggatcttgagctggctgagctgtcgtttgccggtctgcctcagaacaatctgatgggcctccatgaagcattggatccaacgcgatttgtttttctcgatgatcagagcctgttttgcatcgacgctcatatgagtatactcgccctccccgtctcgcaaaagctgtttcgcgagctacagcagtagtggtggctcaaacttaacgccaagtttgcgtaaacgatcgaattcgtcaagaagtttcgagtacagccacgtaacccatgcgctgcgagggcggcctcgtccactgatcaccttggtgctgacacgctgcctgccaccacgtcgtcgcgccgagacggcaactacgcctcgttcggcccccaaaatcaggtcctttttcgcccaccagtctatcgccttggctaggttggccgacgctgtctctgagttgaaaatcgtaggaaatgcagcgacagcttttgcaaacatgcctttaacgccttgcgtctcctcgtgcttttccatccaccgaacaaccttccgacggtttgagatactgctcactgcttgcgtgtgacgtccaaccgcgtgtgaagaagcaggaggaggaggctgcgatgcgtcgagctcaatgtctgactcgctgtccaaaagctccacagctagatcagtggccgaaccgggggtgctcgtagcagcggagttgtcagaagtggttggagcagtcgctgggccacgttggttgagcgcgtcgcacttaggacagactaccggttgtccaaacccttcgttcccggtggggcgtccgcagaatgggtgcatatgactggagcaacgtgggcagcgatgaactggacccgcagcttcgccgcatcccccacacggggcagtagatttcccggactgggtaagactaattttgaacttgaagtggtcagactatttatgaattccaaattttcgctagcacaataaatagtctgactcagaacacagactatttttaaactcagactaattaccgtgatcactgtagtaaatatcacagtaccttaagtgcagcgagcaaacctcgacgacagggcgtcaggagccgagcgcgcacgtctgcagctgcttggtgtacgtgttgaagtcctcggctgagtcgaggtacaacacgggacagtgcttgcgattcagcattagccgcagctagcgacggcactcacagtcgccgtcgttaggctggaggcgccctgtagcgatacttccaaccaggttttgctatccatcgttatcttggccatgcgcctacatcatataatagtacagtaacacacgtcatgatgccgcagaataaagcgatgcaacagtgagcttctcaccttcaaagacttgctaccctctgcccgccttcttcctcgtcgcgacaagcgtcttctccttagcttgcatgcgtacgcacgcgttctgtggcttagtagcgcgccgcctctcgtattgtggggcatgccgacgagtccgccacttcagatatgcggatagatgtcatgaacctccccgtgtgggttcatttagttaaactattaatagagggtgtgtcactttaggacaagtcgggacccacgggacattatgaaggacagctggtagatggtcgccgatgctggcatttggtgacgattggtcgcgggacaatcccaagaatagcggtcaagccccactcgaggagtgacagatgcggtggttgccaatggcagcaccccatggctcgatgaatgtctcgatatctgctttcacatccatctacggggcatgattgtaggcttgttcgacagcttgatatgttgtcttgctaataccaccaagaaatgctgcgcgaatgagtcgagctacggcctcgccttctcgttctgcttgcatttttctctaaggcatatgctacatgatgggtagtctcaacatggtctgggataatttacacgctttattacgcttgggtaaattacgcggcccggctctcgcccgtcccagtttgctctggagactgtcccagtttggactggaaattatattgtgaacgttagtgcgccttacgctcagggaataagtgatctacactctccaaacgtggtccacacacactaccggcatcctccgttctttactgtcagtcatgtttggctacaactagcggagcatcacggtcgctgcgctcatgttgctttaggggtcgacccccaaaactatgctgaccacagagttttggacgacgtccccacttgaggaatttgagtacaaagccgctttcaaattctagcgctttatttcccctttcacgctccccgatttgctggctattttgcaaacaacataagtaccattcatacgttgttattaacggtagacggatacacctgacctgtggttcgaatgccagtacacttgtattttacttacttgtgaatgtgaataaggggttaactttcgatgcttcaatttcgtggtgtgttcattttcagagtgaaaatacgagcgaattattccagtaacctttcgcgatccatggtgaaattcttcctccagatgtcatctgcacccagccgcaatggccaatgttgctgccgcgactatggcatgcacggccgttcaaaactgttagtctgtacgcgtaggtagataacctcatgcacgttgagcgcaataaggaaacatatataatgaacgataactagctcaaaataatgtagttgaccctgatatcgtaccatcacacatgcatgtagggtatcaaagcagagctgcgacgcccgagatcgacgcaacagaactgtagttgagtgggctaatgcatttgcttagtcgaacatcttttcatgagcaacgcaatgaatgaattaacgcagactggaaaggagcaaataatcggcacctatagcgtgcaggaaggacttgcagctgtctgatttcttcacagcgaagtagcaggcgagctcgaacgggccaaaagagagccattgttgctaccaagaagcaccgacacggactccggctcgtacaccccagctcatcgtccagctcgtcatccgcgcatagccttcaatgtaatttagagaagttgctgctcgacagtacccggtcatcagcatgcaaagctgcttgctacttggtgtagcgttggcgcttccttgaggctctgcttgttgatgcttggactctctgttgtgcgctggtcaagcgatcccgaaggggcgcagacttcttaccgacggccgcagagcaagcccttcttacgacagcataaggttcgaagggcaaatagacttaataaagggtcctaagagggtccaaataagggtaaaatgtcacgtttaagtctatttctgatgtcctccatactaacggtcgaatttgctgtttcataacttcgaccctctggttttatggcatctaaagatagtgacgtcgattcagctcagaaaaatccgtgccgataccaccttccgataagcatccaaatgttgttcaaccgaggtattttttttcattttttggtccccgtgtgagcgattctaaattgtgaccctaacccattcgcagaataaatgtaaaaagtaaagcggagtgtaaataagagacgtaaaaactccattaaacgagtctcatgattatagggggacttcgtccccaaaaagtgggtaaaaaaagtgatttctgccgcgcattgtgaaacacacaaaaagttcattgtttcatcgcagaccgagctactctcgatggtatcatgctcgacagccacagctcaaactctatgatctatcagactcaggctagaaagctgagcgataatttcactagctagaacgtctactttcttcactaaaggctgtgacatacatgtagtcatcgcctgcttccagggcctgtaagtgcagcatcaaagccgaatacgccctcccacgcagttcattcatccataccacgagctcctgctcagcttcagtggggagggccatacctgtgccgctcgtccgagcattctttttgagagctgtctgtccatgagctttcgccgcggttcgtggacaaaatcatctagaccgctgtagaaggcgttaaaagccgcggtgatgtcaccgcactgttagaaggcgttaaaagccgcggtgatgtcaccgcactgtgcccaggcatcgagcacctcgagctttctgctgccgtaattgcggtgcgtctgcgagcaggtagcatcttgaggattgggaaatgacccatttttgtgttgtcagttaaacgtggaggatggcaataaggtattttgattggctaaaattgattgtcagtaataagcgaacgtcagtaaagaacggaggatgccggtacccctagtagtgggcggccactaattgagctcctactgtcttcaccgtcagaaatgacgtaggtatatattccatacacacgtttatcatgatgacgagctgatctccataatttgcttttgagttgtggatcaaaagataaataaattggtccagcttgccgcttaaaagaaggacgctggcttgactcggaattgcagccgtcttgttccagtactggtcgggcttgtagacaatgccgtccccatcatagtttccaacattgagttcatcacatgcagccgatttctccttcgagaaggcgcagtacagcgcatccatggggtaaacccctccgtcactcatcttggtgctctcgtaccttgctcgtaagtgggaaacgaagagtgaaggcgtctcccacttctctgaaaagatgatgaggctgtagagcactgtcgagtgaaacgcgtcgtcttgggatttccctgaactaagcaagcccaaagcagtgccaaattggctcaaaacgtcgacatcctccggttcacagcgttggagtcggtaaataacgggcgggatcagtgtccgcaggtacgtgtgcttgaaaagggaacccaagacaagacgcaaggaatacgatggcgggtagtcacccatgtcttccgttggcgcttcgccctcgacctcgcccattgccacattggtgatgagtgaagcgcaggttgcgtttgggtccttgtcaaactgctgaaatagctcgtcaagagtcctgttgaggcttttgtgctcgaaacgggccttcacttcgatgtcctgctcgcgcagcgaaaggagtgcatcaccgacctctccgaagtcgatatcccgctttgacatgtacaggaactcatcgcctggtgccccagagctagtggcaattccatcgagaacatacccggtcacctcaaggggagcgagagccaagatcgtgtcgtagctcgcgccgtacaccgtggtgttggcaccattcgtaaacgttgagatgaaggtcacgaggtcggttgcagcagtcgtcacggagaacgaggcgaggtccccgtactttttgtgcagatcttgagcacacgcaggcacctcggacggatcgatttgggtcccccagggagaccccgtggtcgtgacttgggtccaaaagcgtgctgcgtccggtgccgcggtggtccatagtgtacacgttcacagctccttccagctgggagtgcagcgtcaccatgtccacctccactgcacgacagaagcattatcatagtcagtaggagtatatgacttgtatccctctctacaactgcagaatttacgtacatgccgtcgatgaagagcccgggccaccctgaagcagccacacatggggagctgtttctgggttgccgttcgtcgctggcggatgcttgaagaaaatgtcgacgttggagttggcggacgtgggggtctcgcagataccagggtagcacataggagcgttgtacatcgcgcattccgcgtcttcgctcgagctgccttcgtccgagaaggtgtagtcggagcacgggtaccagcccctgaggtcggtattcgaggttgagttggacgctgctgaagcgtgagcaaccaccattgacacagcggaagattttttaaatgggtcttatgcagaacaggtcttggatttgatcagactgtactttttctttgaacttgtgattggatcacaattgccacgctgtgacgacgcaaaaagtctcactttgaatcctcagccatgatgctgggaagccaagcctacctaacgctgcccgctcctcggtgatgccaaagtcacacctccacagaccgagccgttgaagcaccctgggtcgccgccctcggcaataccgcaacggagtgcgtcggaggaagacgagcaagatcctcgccatgaggagctccaacgcaaacgagcgcaagccccacgagcagagcagcaaatgggcatgagtgaggcctagaagatgcagcagcaccatcgcaggggtcagcaggtggacaagatgcgtcacggcagcacgaacagcaggtgggcaagctgcgtcaggagcagcccaggcagcagtcgaccaggaaggcttataacgtcgacgggtcaagtccgcctcgcaccacgtgcagcaggacatgctgcgctgtgcaagtgtgctgtgcgagctgtgctatttggggatcgaggacacggatagtgacgtggtggtgcggcagccaccttttgtcgcggttactgcagttgacgcacagaccggtgcgggcatcgtgtaggcggaggtgctctacatgccccatgagtgtggagcgcgtcaagtccacggaggttatccgggtgcatcgctgctgttcctgctgttcaagcccgcgtagctcgccgctgcaccgtgcgccacccctcacttgtgcgctggccgccgcttccgtgcggctccgagttgagcttgaacgcgcgcactttggccgtcacccacgaacgagactggcgcccgcgtatcgatgcccacgacacttccatggtgcatctggcggtgcgtgggttccacgcgtgtggacgcggtgcccgacgaggtgtgcgcgcaatcggacaaggctggctcggacgtcacgaagacgcgccagcgctgctgccgctggtcgcccaaggttggtcgcagtgcagcgtcttagcttcagagaggttgttaccgtgctgcggctgtggcgcctcgctacgagttgaagcactttatttttctctcagccaagcagaagggaatcacctcgttgtggctactaggtattctaaagtacatataccatggtaaactaattttacgagatatatgccaattgccaacagtagactgtcgatgttgattgagagtgtgaacgaaaaagaacccaggtgtgcactgctttgactgatagacgcatacagttctcagtgtacagaagtctcgaatggaatacaattgagcaccacccatagaagcatgaactgcgtctggtattgcaactaatgtatcttgctgtcaagagcagttgggaagggaatgttccattgcggcggcgacgcgttctacctatttgatagtaagtcttaggtgatagtacatagcaatggacgcaatgattgtgagcacaactacctgccaaatacctcttgaaccaagataaccggtcaaaatggacactcttcacctggagacagcaccacgaactattgctagagcaggaagccgaacggggcacacgcgaaggaacaagtcatgtcatgatccaaagttgtgaatgtttggttcatgtcttccaattcggtctcacaatcagcatgttcaaatcctggacctgatctgcataagaaccaaaataaaggcaaccgacgcagcaacgatatggcagagcatcatgactgcttgtcaagtgtctgcggagttggaagaaggaaaaatcggaaatggtggcttgtatctgcgtggagagcaagccacaatcgccagatcgccatggttggagcacgttgttaggaaagtgcattgtggtcgccgttttgctttgaatccgtgaacgtcacgaatactaaggcctatcaaggttgggaagtttgaaataaagatgtagatagatgtggattttgtaatttcacacaagtacgcggaatctatgtgctccaaggcgagaataaagagcttcgactactccccgcatgataccgtgtcgtcgacgcaaatggtcgctggcgatccgtgtagtgaaacctgcggcatgaaagctcttgcgtcgtacgtgcgaaatggtgaacatctccagcgtatggacaagtcgtgcgtggaggagatgcctgaatttgacttaaagacgcccgagtactatctgcagagcgtcatgggcaccgacgatgcctacgatggcgtgtttaactccagcttgagctcgtattaagcatagtgtgacggggcacacagcactcctcaacaaaggaagcaggagtatacaaactccaagtgaacagccgttcacgtgtccctggtctgaagggggcgacttgacttgaaaagcggtagatctaagactgaatgtatttataggttggtacagatttggcctgcatacaaatcctaagttccctatagtttgtgtcatacaaaatgtatctgttggctctgaggccacttgggtcactatccaggggagtgaccgatgtagccatccctgaatagggacagggtcactattccatgtaaccccgttacatcccccccacttagattcgatcttatcgaccaatcagagcgaggttacgccggcgactcacatttcactcgcaaagttgaaatccatcgacaacggcgcgagctctggcgcctcggctcccgggcctcacagggcaactggcgcatcgccgagcaagccgcagggtctccacgtcgaccggaagcatgcctccaaagcgcactgcgcgcagtgcgaaagcacctccgaaaccgcgggccgtagggccgaagaccagggcggccaagcccaaggacgagtcgtccgcgctgatggaggccacgaaggcggccgaggaggcggtgcgctctcgtagcagcacgccggagagtggccgtcaggccggggctcggagcaagtctcctgacgtcgcgcaaggcaaggaggagagtactcggggccataaaagcctggctcgcgactgggaagccgccgtctttgactgcacgatggtccagtactccggtgagagttcgcccgccgacgagaacgtctcggagggcagcacgcacgccgccgcaggcacgtagctggcggcaggcgacatggccgacgcctcggccgacgcaaaggcctcgtcggagaaggaggcggaggacgccgagtcaagcgcaggcgacagcaagcagtcgcacgacgaagtcgccatggccgacgctggggtcgtggccgagaaggcgccgagcgacgcgggctccaagcccaaggaggtgctggcatccatgcatctcacgctggcgcaaggtcgtgatcgtgcccaagcgtcgaaagcggctgccgctgcgaaggccgccgaggccaaggcgaagaatcgttcagcttccaggtcgcctcgcggctccagctccaaacttttcatcgattcggagtctgaggacgaggagggtgccgtccacgagctcaaggagctctccaacaacctcgacgagcagcagcagcaataccacgctgctagctcgggcgcgtatgccaggcagccgactaccacgactgccatcgagtcttctacaggcggggatgccacgtacccgcagggctacttcccgcccgagcctggcactggtgcgccagcgttgttggaaaagctctcggctcctcgtggccttatcggcgggtacacctcgaggggttcctatgagcgtgctctcgttgagaaagagccactctttcttggcaacgttgaagtcgcccggtgtgtgctactagcaccacacaagctcacactgaaggagttcgccacgcttcgcaagaagccggagtgtaaggtttccactgggtcaagccgaatgacaacataacctggagcgaggtggaagaccttttctggcgctacgtccagcgcaaagggtattccgaccaacagttcaaagaactccgtgaggatcgcactctctccgcaatcctggacttgcgcgagctccgcatcgagttcgctcaactcgtgagcaagcgcaagctccgtccgaagatggacgagctcaagcaagaggcgagagccaaagctcgtgaagagcgtgggcgcggtgcgactacgtctactaccgtgccccgggtatcggccaagaagccaaggactacttacgaagttgccgttgcttctcgtcgcatatcacaacagccttcgggcagtctgcctggagctgctcaacgggcccccacgagttatccgactcagggtagcccctccactttacgagcagctggagcttgccatggagccgccgctcccggacgatgggtgctacacatcgcaaaggcaagcacgagcttggtgctacagtagagtgcacacacgcgacagcgttgttctccggaaaggctaggttggccccccacgcgaatgcagtgagtgatgcgaggctactgctcttcgtcttgctgtccgcacgacactccagcataacacgtctctcgccgtaagattaaaagttaatatgcccgaggatcctttcgcccggcgcagagagggttcgctgccattggtaacgtccgatcgccgcgctccatgagctccatgatcttcgttttgcaggctctctgcatcccagcgttccacgtggtagtggatctgtccattacgatcaaggagggccggtggtagcctcgcacggccatggctacgagcctgaggcgacgcagccgtatgctggggccccgagttagatggtggccctgcagcaagaggagattcgtcttctccgggaccgcgtgtacgtcctcgagatcgcgcttggcgtcggccttggtggcgaggctgccgctcgtgctggccagcgtggtgccgtggagcggctccgtgaggatgttgtctcgctctatcaagagactcgcagtctccatggccgcgtggatcgtcgagccgacctgtcgtcttacgaatcgctgcgaaaccagctcgctggccttcggaccgagcttcatggccacgcgccgtacccggagcagcagcagccccactcgtatcaggcccagttttggccagggctcgtacggggcctctgcgtatgctgctccgatgtacgccgcgccgtcttatgaccagcgcgcgtactaggcgccttaccgtgacgcgacgccgcgcttcgaggagctgcgctcttccccaccgggccaccctccgcttcctgcggggcagccagagccagagggtcatggtatctcttaagacgacccacgtaaaacgtcgggtgagtcgtcattgacttgggtaagtctatggtgtacgccgcgccatgccggctgagaaccgtgaagggtccaatgaagcggtgcttcagcttgttgctctcgaccgagctaacagtgtttagcggtaggtttctagtatctaggagaactaaatccccaaccttaaacacgttcatgtttcctcttccatttcggtcagagtactccttctgtttgtcttgggcttgcgccatggtgtctctcaccctgctgattatgttcagcctgtcctcggcaaacgaggacagttgcttccgcaaggcggctggactgacgtccgagacttgggaggaaaagggtttccgagcctctcccccacttaggaccgaagccccgatgctgcctcgtaatgtgagcggcacctgagggtggcgcaacccgttcaggtatacgggtgtaaagcccgtcgatgcatgcaccgcattgttgagtgcgaactctaccatggacaagcggtcagcccaagtgcggggcatctccgcgcaaatactgcggagcgtgtcctcgagcacgcggttgacgcgctccgtctggccgtccgtctgcgggtggtccgccgtcgacatcgacagccgtgtaccgagaaggcgaaacagcgtctgccagaacgcagcggtgaaccgcgggtctcgatcagagacaatggtctcgggcataccgtggtgtcggaagacacagtccatgaacaggcgagcgacgtaaccaccagtgacggtgtcacgaacaggggcatagtgtaccatcttgctcagacggcacacaaaggcaacaacaccggtgttgccacggtcatcggccggaagtccgaagacaaagtcgagactcatcgacttccagcagtccgctgggaccggcaggctctacaatggtgccgaggcgtgaccggcaggcttcacgcgctggcacgtctcgcacgtccggacgtaggtggcgacccacttgtacatgtgacgccaccaaacgtctgcgagacagacgcgtacgtcttctcacggccgagatggccactggatggagcgtcatgcgcctccatcaggatgtcgtacttgagatcctcgtcgttgggcacgacaatacggggaggatcctcgggctcgaccctatagtggagcaagccgtcagcccactcatagcggtgcagtcttgcacgctgtcggggcgtgagccactcggccttggcgtccgagccagcggccaagaaccgcgcaagaggtccgagactggcatcgtctcggtaccccagcctgatgcgatcatacagatccgtcgtgacccgactagtatgagcaagctcgtagtcgggtcggcgcgacagcgcgtcggcaagcacgttcagcttgcccggcttgtactcgacacaaaagttgtattccgcgaagaatgacagccagcgcgccatccgctgcgagaggtgggcgtgttgacggcagttcgcaaggacgcgtggtctgtatagacgacaaagggcttcgagcccaggagatgtactcggaacttgacaagagcgtacttcattgcaagtagctccttgtcatgaactgggtagttccgttcggcagccttgagctgccttgactggaacgagatgacccgttcgcggccttcatcgtcggcctgcaatagcgcacagccaattgcgtagtcagacgcatcacagacgacgctgaaaggcttcgtctcgtccggcaataccaggactggcacgcgctgtaagctcgctttgatgtcatcaaaagcaccttggtggcgacgctcccagcgccagtcggcatccttcttcaagagatccgacaatggccgcgccagctcggcgtagcctgcactgtacttgtgcaaatagttggcaaggcccagccactgtcgtagatccttctgcgaccgaggtggcggccaagccgcgatgattttcaccttctccgggcccgcccggaccccggcgctgctgacgaagcaacccaggaccttgatctcctcagctgcgaacacacacttgtcgatgttggcatacagcttgttcgcccgcatgacttcgaacacacgtcgaaggtgctggagatgcacctccatggccgtctggcctgcctcggcacggctgtggaggaagatgtcgtcaagtacgtctgtgtgaacgcacgcaaaggtcggaacagatgtgtgaccaagcgattgaacgttgccggggcgttagaaagcccctgaggcatgatcagccactcccagaacataccgctcggcgtgctcacagccgtgagtgggatgtcgctctcgcgcatcaggatctggtagtatccgtccaccaggtccagcgcgctatacagcgtgcagccggccatgttgttgagcaacacgtcgttgcgcgggatcggtgtctgcgcaggcactgtcgcggtgttcagcttgttataagcatgaaccagacgccactttccgttcggtttgcgaacacagaaggtaggcgtcgagtgcggggacttcgactcccgcaccatgcctgccttcgccttggcggcaaagaaggcatcaataacttcacactgctcccggggaagaggccattgcctcgtgacacagtacttcgtgcccggcacgagatcgatctcgtgcctaattcccctgtccggagggagactggacggtggatccttggacaccacgtcctcgaactccttcaccaagcggtacaccgggtcccggggattcttaagaatctcagagcccatgcgcgacgcgcgctgtctctggaactcctccaggacttcctggtccatgaccgaggacgagttcaactcggccgacgtggattccggtcggagaagaaccaactctgcgatctccccggcctttagctcggccaagaagtcctccatggcgagctcctcaaggttcagcaactctgaaacctcgggcagagctgtaagctcgacagctcctgtcttgacccgacgaccggtcacgccgtcgaagatgtaataacactcttcggcggctggagccttggctggaggctcggagtcgctggcgactggtgtcgtcgaccacacgactaggcccggcttacgatgtgaccgtcggttgtcttcgtctcgtggcgccgccttgacgacaccactgatcttctcgatctcgtgcggaactacgttgcccgccttgtccttgagcggaacttgattacccgccttgttcatgagcggaacttggttacccgccttgctgggtggaactatgttacccacctcgccgtgtggaacttggttacccacaccaggagcgcttccagcgactcccgcatcagttatggtctgagtgacctcctgtggaactatgttacccacatcggaagcgcctgcagtgccttcctcatcagttacggtctgagtgacctcgcgtggaacttggttacccacgccaacgccaggggcgccttctccaacagcccttgctgcctgcggtacttcgttacccgcgtgtggacctacattacccacctggtaggtgctgcccggcacctccactctctggtcttgtccggcccggtcggagtcgtcgtcagtctcgacggaccccaagaactcattagacgctgctgcgccctggcggccctcgcgggcgccccagctgctgccagaggtgggaacatgactcaccaaagctctgtcagagcgtgggggacggctggccccgatggccttgccgcgccagtcgatccaaggctcgtgtttctccagccacggcatgccaaggatcaagtcgtacttgtccatgtctaggaccaagaacggctccgtgctgtcgaagtcctcgaacttgacagtgaggtccatgtggacccgaggtacttctaccaccgtaccgtcggccagtcttaccgagaccagcccgttgcctttgctgcctcgtagcgcatcggcgtacttgtcgcgattgcgtgcgacagtctggcggcgcgcaaagttcttggacgccccagagtcgatcaagattctcaagggatgatcgtatcccggtacactcgcgtgtaccacaagcagcccaccactgcccttctccgcttcgagagtacagagactctcaggggctaagtccccatggcgtgcgccacccgcacgcccctcatgaagacctagtgtttccccagtagggcgccccgcccctactggtgtccggcgttcccctggttcctggggcgcggcttctgccagcgacccctagagccaaagggcttcgaagagaacttcttcttcagtcctcccgcgggacaggcacgtttcaggtgcccaagcttgccacagccgtagcagcgaatgtcgctctgctcggccatgcccagatccatgggaaccggcccgttgatcgctccattgccggagttaccattaggcgcaccgccaggcagggttgctctgccataccgtggcgggggtacgagcctgcttgttgctgtactcctcctggagggcgatctgaatcgcctcctccatagtgtttgtttgcacacggaacagttgcgtgcgggcaggaccgacacgcagaccgtccatgaacacggtcaccttgatgtgctcaggcagggggttccccaccaaagaggcagtgagcactcgcatctcctggatgtactcatgcagctcgcgccttccttgtttgcaggcgaggaagcgcgaacgctggcggtactcgtagttcgccggaagaaacgcggcccgcagctgctcgcacagctgggaccatgatgcgaagcatccaggcgtcgtcgcttcgcgcgtatacgcccaactcttagcgcgaccactaaggttggagagcgcaaaggcgacacggagtcgctcgtccgagacgagagccgagctcaacctctcgaacccagaagtgaaggttttctccttccttcccttcgaaggggtgaaccttcagccgcaggggcttcggttgcaccggcttcggcgcggccgcagtggcctgcagcccttgaacgtgggcgatgagccctcgctcgtaggtgtcgaacgcgttgatacgctcaacctgctcagccggcgtcgccgccgctaagctacgcagagtatcttcccaaagatgcctgccatctaacgaacggactcgtactgccagtcgttcagatggggaaactccgtccgatccatcttggctcactcgatgagaccacagaggattcaggtagtccaatctacccgcgtaggcgtaggattgactacaagtgctaccaagtgtgacggggcacacagcacttcttaacagaggaagcaggagtatacaaactccaagtgaacagccgttcacgtgtccctggtctgaagggggcgacttgacttgaaaagcggtagatctaagactgaatgtatttataggttggtacagatttggcctgcatacaaatcctaagttccctatagtttgtgtcatacaaaatgcatctgttggctctgaggccacttgggtcactatccaggggagtgaccgatgtagccatccctgaatagggacagggtcactattccatgtaaccttgttacatatagtttgcagcatccgtgcttacgacaacaggttgtctagtagctcccaaggatgtgtgctgaggagccaaaggtagacctctcgatacaaccaggacgggcatctcgaatcacgaatgttttcaatccgaacattcaacaaactcgcaaagactttgaattttgataatttgtcgttcaaagttttgtttcaagtagcagctcgatcgttaagttcgataccctctgcgcgagtctgtaattggttcaaatttggttccgtaacttaagttgacccaattggccattatttactcgatgcttgtcaaacaaggagagcgatcttttgcgtgaagaggtgtgcgtgcttaagtctccactatgggcacgacgcgactgcctcgcctggtgctgcgttgggtcttcgtgtgcgcgcttgccatcgtttgcaacaactgcaacctcgacgtcgctgcatccatcgcacctcgctcatatttttccagcgctcgcacggctcagacgccaaacgaccctgtcatcgctgacgctgccaacgtacgcacattagataatcacgcttcgtgccgtgctgtaagcttcatattaatatccattgctgttgtgctgggcacagtttgcagtggagcagcttcgagacctgtcggactcgggcatctaccagaccttgtcgctcgcgaaggttcacgcagcagctaccgaggtacaagatggaggatcaatactggtgttgctgaaagacgattaacggttgctattgtgttgctaacatgtagctgggggatttacactatgtgattcacctgcaagtggcgctagcgtcgccgtatttccggagtaagcgcgaggtggaggacttcgagatgatggtgctggagagcaagccgcgcgttgaagagcgcgtcggtggcaagtacaacgccacgcgcagcattgccatcgacgagttccccgagatggacgaggacgcgattgagagcttctgggtgaagatggtggaggagcggaggcagcggcgtcgcgagctgttcgagaagtgggagcgtgagggagagactgcggaggaatcgcatgccgagaccgagtctagcaactccaagaacgaagagcaggaaacaaaggcttcagtcaagaaggtgaccaagatgctgacgatcgaagagctgcaagccatgccagcaaagcagctgcggcagctgctcacggcgcccgagagcacggcgccactccgcgctgccatctccgccattctggacgagcggctaacgttgctggagcagcgagaagaggctatgaaccagcagcctccgcagttgagtctccagcgcgacgagctataaacttacgtagggggttccacatgaacagcgtagctgatgtattcagataagcttaaaacgaagggcgaacgggctcgtgctcaaacctaaatgagatctgccacgttcatgggcatctcgtcgatctgcgtgctatagtactgctcgatgtcgcgtaggatgcggatgtcgtcgtccttgacgaagttgatggccacacccttgcggccgaaacgaccggagcgaccgatgcggtggatgtacagctcgcggttgttgggcaggtcgtagcagatgacgagcgacacctgctgcacatccagaccacggccccagacgtcggtggtgatgagcacgcgcgagccgcccgagcggaactcctgcatgatagcgtcgcgctccttctgcggcatgtctccgtgcatggccgaaacggtgaagttggcctcgcgcatcttggccgtcagccagtccactttccgcttcgtgttgcagaagatcacggcctgcgtgatggtcagcgtgtcgtacaagtcgcagagcgtgtcgaacttccactcctccttctccacggccacgaagaactgcttgatgccctcgagcgtcagctcgtcacgcttcaccagcaccttcacgggctcgttcatgaacttgcgcgtcaagtccagcacctcctggggcatggtggccgacaccagcagcacctgcgtcgacggcggcaggtacctgtagatgtcgtagatctgctccttgaagcccttgttcagcatctcatcggcctcgtcgatcaccagcatcttgatgttgcgcgtgcgcaggttgcggcggcggatcatgtcgaagatgcggccgggcgtgcccgacaccacctgcacaccgaagtccaggcgacggatgtcctcgcccacgctcttgccgccgatgcacgcgtggcactgcacgttcatgaagtctcccagggccagcacgaccttctgcgtctgctccgccagctcgcgggtgggcgaaatcaccagcgcctgcgtctcattgctggaagtgtccagcgactggagcacggagatggagaagacggccgtcttgcccgttcccgactgcgactgggcgatcagatcccggccctggatagccggcttgatggcgcgctgctggatggccgagggtttctcgaagcctgagtaaaacagcaataatatcgttagaaaaggtggttgaatcactctcgagactgtgctggaggctacagagcgagctagagccccggagcagcaccgttgaagagaggagactcgtaccgtacgagtagatgcctcgcaaaaggtcctccttgagccccatggcctcgaacgtggggtagacggtgatgtccttggacgtggtgaactccaccgtgtctccgtcatcttcgtccacgagacgcgtgcctgcaggggtgaaaagcacatcggtcaatagcgcagagagtcagctacatgaacatggtgggcaggtggcaatggtgccagcgggggaggaggtagagcgccacgtacgtcgcttggtatcctggtcgcgcggcatattccctggtcgcttgaattgtgtgacgtacgccacccactgaagcgtttctaatttaagtagaaacgtttctattggaggattaaaaaaagaacggtacagatgtaggacctacaaaatgacgattattttcagtttagaacagcttctagtcagagaacatctagcaaattttatctttcagctcgcgaaaaaaatccgaaatctatctgtaaaaatgttgacctggaacctcagcaaggcttcctatgaactcaagctggagttgaaggcaccctcgtaggcgtcatccgtgctcatgaaggcttgcaggtagaactcgtgcgtcgtcaagttaaacgcgggcatctggtccacgcacgacttgtccatacgttgaaggtccccaccattccgcacatacgacgcaaggattttcatgccgcaggtttcactccacggatcgccagcgaccatttgcctcgacgtcacggcaccgtgcggggcgaagtcgaaggtgacgagctccttattcttcccaacgagcacattgaacagggattcagcgaacttgtggggagtttgggggtccagcttcccacataacagaaggacgctggtctggctcggaatcgtagctatcttgttccagaactggtcgcgcttgtacacaatgccgtcaccttcgtacttatttatcacgctgcattagcgagaaagcagcgtttgcgttgtcgtggtccgattgcttcttcatctctttatagcgtacatgcatctgcaagggagtttatcatctccggaagacccaaactgaaaaaggcatccgataccaaagtctgcaacagaatcttaggaaaagttaggggtttgtagatttcgtctcgttaggaatgaggcaaagtagtggactccacctttgtcctattgtggtttacgaccgacgatgttggcggaagcgtgcgtcttgctctagaaattcccagactggctcactcagcgccaagctaacgtcaatactacctgttgtgaaatcctcagcttgatcgacttggtcctcggtcgccattaagtacatcagcccgtcaatgagcgagattggcgtgaacggctgagctacaagtgctggcgcgacgtcgagctcggtacctcggtacatgccaaacttgttccactggctcaccatcacgccgccttcttcgtagcggtaacaaagtctcacgcgctgtttgtcgggctgggcagcgagccaacgcaagttctgctccacttcggatggatccaggggctgaactccgtcacgaaccgcgacggcgatgctagacaatggagcgtttcgtagttccgaggcagatagcgagaaaacggggcaaagcacgcagttcgggaaataccgcggcgataccttcagttggccgcgactgcgcaggtcaacggaagcgaggaattgccgtggggcgtgcagttctgcctcctctgagcgcattccctgagattcacacaagctcactcgcgcgcgaaagatgttctgccacacgtgggccgccagagcgcagaacgttgacactgggcggtcggtatcgccagcattggcctcagtcttgatagcagcgagctcgttcgaagaaaaccgcagaatcttgccgacgacaggcacgacgtttgccacaggtaccgtctcgctgctcactgtggactgcgactctggcgcgagctcaaacagcgtcggtttaatctgaagagcttcttgtctctcctcgagcgacatctgcagctcagacatgtacgcgtgaatttccgggggcgagctcaacagtgtcgcatttatggagctttgacccaattcgaggtctctgacgccgcgatacaactctgccatgtctctcgcgagctgaaagaaccccgcggcgtcgcacacgatgtggcggaggcggataccgatcgacactccgccgcaggcgaagcgtgtgcgctgcactgtcaggatcgcatcacgcgccgccccagcctccgtcgggtcgaaagacggcagtagcgcattgcccctgccaggtaagttcgtgccgatcagccgaggtgttgagcctgggttgtcgtcttcagacacgacctcgaacgccttgagcggctcactgcactgtgccgaaagcagcttcgcccctgtgccgagctgctcgatctgcggtctctggcccttcgggtcgatgacgatgcgaccggttaactgcgggtagtagtccaacaggcggcttagcacagctcgaagtcgatcgatggggataagctcccgggttgcgtccggcttctgacggtacacgaagacgacggccaaggggatggcgagcagcgagcactggtccagcgggccgaggagcattggcgatcgaaggctttggagggaagatgggtcggcgcattgcagcacgaactccgccgtcgtggccaccgtcgaggattccttctccattacagcggaagtgaagaagaatgtcctagaggttgcaagctgatatctccagggggggtcggtaaggaatgttcgcagaaggtgcgctgtggtaatctttgtcacgccgcgtaatatttcacttcctaccaatgaaatcacagcatcctaaaactaacatccttaggatgttaaaattatagtctaggatgtcatcctagactataattttataatttattagtctgcaatacgtgcacgggcaggataggcgacgtaggcaaggccttttgtggtgcgtaatatttcgtaggatgtactgcacgcgaagaacgcaaaatcagagggtcgaaactacctagtaggaaaaactttggtctgccgttgaaattatctgccgttcatagttataaccaacttagtcctttacctcggagatccagttcttgttgtatttctgcgtgtaccagtcatcgcttctcaatgatttcagtgccagggtagctgagaatagcaaggcgaccaacgtcaagagcaacaccagacgcatggccccgtcggaaaacgcttgctcgagtgctggggcgccagcttcgaaatgagctgtacgcccagtatgaactgtgcaattgcttatgtcagctaccctattcgtttgctcactgtaaaaaaggtagaccgctggatttgcaggctgtagtattcgtgataacttacaataaactcatttcgtgcaccgtgccgtacagtgccaacgatgccaatgattgctggcgacccgtggagtataactcgagcttgagctcttaagtattcacaggtcgaagacctgtgcttggccctggcaaaaaacttgtaattttccaaaaccgggtaccaaaccgggtctctctttcttaattgtaatgtttaagctaatatctgccggaatcgggtacccgtcgataaatgctaagatttatgcacattatttattgtgttttgcatccattttgccctcctatttagtgcacgagttagtgttcgtacttcaggataaatcatagaggctttgaatgcgagttgctcaaattgtgtttcgaagccgatttggctcggaaatggcactttctaaaagtgccaaagcgatgcttactcgtgttggatgcgctaaatcatgcacgagttggtctgtgcactctacctggtgcagattgaccatccatgatatacagcaattcgtactcgagtacgatttatagataagtcgtgctcgataagtcgtacgagttacagtccaaagtgccaaaaagtctgcaaagcacaataccaaaggttgatactaatcgttcattctttaccaaaacctgcgctcaaacacttacggacgctccagtacactatgagagcgtcatggcctgtatcaatttacgccataatcggccaagcttagctgaagatgacaaatatgacttgtctagctgcaggctgcattttttacatgtcaatttgttcaatactcagtcagtgattggcaatcacttagccgaagatgcccaacctcgtgtctctcgccaaaccaaccagctcaactcgacagtgacacgagcatcgttcgtttgaattaggctttccttaactgcgttgaagcgcccacttccaaggacttggcacattaacgtatttctcattccgcaatttaccctcaagttaaaaggtcaagatcagcgcaccatgcatctctccttcgttccgcttgctctctcgtctgatcgttagcacacaacatagtactaaatgagcacagtataccttacctgcaaactgaatgaaatagctctctcgttgctggcatcaacgcagccattggacgctgaccagggtgttattcccgggcagatgctgcggctgtgaagcaggcgcagtagatgcccaagttagaatctactagagagttcggctggattaaaaacaacacaactttgggatttactcaattgctatccgttatcatcgtccatgaaattattcgccgacctgtgtaccctctcggagcaacgctccgggttgcctatagacatctccacaatgctttcgtgtaagaaagcattgtggaaagtctaccaatcaaagttaataaagtaagcctccaagactattgggaggccaagagacatcaaaggtacgctgaacgacctccaatacagtttgcacgatatttgagacggatacgctgtgttttccatgacaattcgtacggaagtctattcaaccatgtaactacttttttcacgcgcggtgacgtcgaaaaagggcgtcttgatcgataatatcccaggccggttactcaacgcgagactaacatctacgctggctgagggaaccccagtggcatggcctgagtgagtgagctgaccctctgtggccataaaataagccaggccactgtaaagtgatagcggcgtgaacggttgagccacaagtgcgggtgcgacatccaatgccgcccccagatacatgtcaaacttgttccactgcgtgacaagcacgccttcctgctcgtagtcgaagcaaggcagtacgcggctcttgtcgggctgcgctacaatccatcgcaacgttttcttcacgtccatggggttttgtggttgaattccgtcacgaactgcttcagcaatcttcgatagatgcgcgttgagtagctcagccgcaggcagcgacagtaccagcgacaaaacggcgttagggaagtatcggggtggaagctctgctagttggtcgcgacttcgcaggtctatcggtaccaaaagctggcgcgataagcgacctgcagcctcacctgacgtcaagccttgggcttcgtacacactcgtcctggcgcggtagacagtctgccagacatgagccgccaaaacgcagaaagtcgacagcggtttgcctggattggtttgattggcttcagccttgagggcagctagctcgctcgaagagaaggggagcacgcgaccgatgatgggcggaggtggaggaggaggagttggtcgcttggaggcatcagtgtcggccgccacatcttccagcgttggtagctccttgaaaacaatcggcttaaacttgagcgcttcttctctctcctcggctgtaacatcgtgcagtcccgccatgtaggagcgggtatggggcggcgtggacagctttacagcatgcgcacgttccaaatgctgatagtcgacgtctccatagcctcgatacagttcagccaggtcacgcgcgagttggaaaaacccacaggcgtcacaaatgacgtgtcgaagacaaaagccgatcgacacacttccacacttgaaccgcgtgtgctgtactgccagtatcgactcgtgagtcagtcctgccgcagtcgcatcaaacggcggcagcaacgcgttgcctccatccggaagattggtaactaccaatcgcggcggctggtcgtcctccaccatcttctcaaacgctgcgaggggttcactgcactccgccgccagcaacgtgaccccctttccaagctgctcaacgcgcggtgtgcggtccttcgggtccatggcaaggcgtccagtgagatggggatagtagtcgagcaggcgactcagcgcgctccgaaagcggtcgaaaggaaccaattccgcacttgcatctcccccccgacggtacacgaacacgaccgtgataggcgtgaagctctgcgtgatgtggtccagcggcccgagcaccactggcgactcgagctcttgcagcgatgtctcatccgagcaatacaccgtcaatttctccaccaccgtcacatcagaagacaaacccgtcatagctaccgcgacttgaacaatgagcactccgatccaacagcatctcaaacactgcaattgttacggcgaattgcttgaccacgccgaacacttcaagagtgttcggtctggtctggtcaagagttgaattcaagtcgagatacccatcacgccaccgattgcttcgcctatttccggtttctttccccagcgatttgcgttgaattacccatcaacttacccctgcattgcctttcgcctccaagcacccgctggttcgattgcctcagttcccccttcctcctctccctactgtaccgcagagctcgaaagcatggaggcgctcgagtcccccacgaggctcgtgacggacgaggccacgcagtggctggcgtccatggacgagatgcgcgacgacgacgcgacggacagggcgccgtcccccaaggcagcggctgctagtcccggcttcgtgtcgcccagcaccgactccagccccgtagcgtgcagtaagaagcgcgagctgagggagaatcacgactccgagcccgaagtcccgaagaaacggcccaagcgcaagttccgcaagtccacgatcaacgttcgaaaagtgaggacaacaattatttagtgggtgggtgggtcgaattattgggttttattaacgagtacgtgggttttattgcttttattgcaggaggagaaggccaacttgctggaggagctggccgagctgcacaccaagatggaggagctcaaggcgcgggcgttcgccacgtgtgcgggcgtgaacacgcggacgccgagtcagacgcagggcgcaaatcgactactgagacaggcgatccagaagcagcagctcgagtgcaccaggatccacgcgctcatgtcggagtactcgttatttgtgagttcaactccgttatgttgcagctggggagagcggagatctcatggagtttttattggtttttttttgcagaatattcgcgttggcagtcctatacatcggccgatccacttacatcgggatacgcactctcgacgggctacgctgttggcgttcaagagcaaggttctgcaagacggcgctaagtttctcaatgaccggaggccgcgtgtggacccgctgaagcccatgagagaagaccacggctacgaggcgtcgaatggggacttttacgcgacgtacatctctacgatgcagttcgagaacacggtcaaacaggtgtacgacattttgctcgcgtacttcagcagcatcgagataagcgtgtcggagaagctgggcaacatcacgatccgcgaggacgacgacaacatggcgccgggcatcacacaaaaccgcctcgtgtccaccaccatcggcgggctgcgcatggagtccaacacggtctacttctcgcggtacgagccgggcgaccaagacgcaggtccgcagaacgggtacggcatcttcgtggcggacttcgtggacgacgacgacctgaatccgtaccacccgcacgagcgcatccgccgcgacttctccgccgtgctcgagctcacgtcgtacccgatcaagcacggcgtacgcaccaggtccaagaacacgagcgagggtcgcgtcgtcgtgctcactcgctgggtgcacagcaaagtgtatcaccccgagtacgagatcccgcagtcgggctggcacgagatgcgcgacaacacggagcgctggatccagacgctgcaccacacgatgatggagcgcctctcccccgtcgtttgctgtcgtaggtagaagaataaattcacacgagttgccacaactgcaactgcaacacgaaatatctcgccagtcgccccgtcacaggaacatggctacatgcaaaatgtaccaaaaatgcggtacatgtggcccgtcaccatgtttacaggccatttcgctcagtattttcggggcgatagacacacattgacgagcatgaacatgagcagcgacctgttcggccgcctggacgccgctgggcagcgcgcgccgcctcgtctcaatggcggcttggaggctgtgaggtaccagcggtaccagcgccaccaagcagtgctccgcagcgcggaaagacggcacgcggtcgcaggcgaagctcgccagcacagaaaccgctgcgactgtgggaggtcactacctctcgttgccccgcgcggcagcggttagcaactgacagacgcagcacattagcagcttcagcagcagcaacagcacctaccagcatagcaaagcataggtcggttaggaaactccttcaacacgagcaagggtcccaaggcggcggcgccgagctgctgcgcagctcggcactcacttccgcattctccagcaggagcacaaccagctccgccgccttggttgttcccgccacggcattctgccaaggcaacctcagtctcctaccttccgttcgtcttctgcccgcaccttcgtgctgagatcaactctgctacgcctacagctctgcagacagcaagtacacgactttcagcacctctcagaggcgagtttcccgcagtcgcaggccgcgttcgcgcccctcggagggctgcccgtgaaccctggaatgtccatgcgaacgtaccccgtcaacgccaacgccaacgccaacgtctccactgtcgtcctcatcgtccacaactgcggacgtggtggacccagcgcagccgtggctggcgttgatggagaggagggggctggtgatgcaccaagaaggaaaagagaggcaggttgtggtcaagaagaaacgtgtggagggggagcagaggagtgaagacggaggagaagcccaagcggaagaggaagtatcgaaaggctacgcacacgatcaggaaggtgaggtggtggttgaccagcgatgtgaaggcgaaaggtctggggtttaactggtgtggtttctgttggtgcttaggaggagaaggagagactgctgcaagaagtggacgagttgaaggcgaagattgtggagttgcgaagccacacaagagtaccgataaacgaggaggaggagatgataatgagaaaattggaggcttctagggccctccgagaaggcgtgaagcagcgccagcaggtcttcagtcatctctcgtcgatcatgtcggagtacacgttatgcgtaagcttcgtcgggcttcaatccccggtattcgttgaatcttctcacgtttttttatctgtgatgctgcttcttgtagacaatccaatcgggtagcccgctgcaagactttatctacttaaagaaggacgagcaatctcggcaggataccctggcgatgataaagcgaaaaagatggagaaggcgcagcgcttcatgcagatgcgccgaccaaatattgacccgtgcaacacgatggccgaggagcgccgatatgaggctgagaacggagacttctgctccactcgcttcgccgtgacgcagttcgaggacgcgcagagcgtgaagcaagtcttcgacctgctgctgttgtacttctgcaacatagagatcagcatctcggagaaaatcggccacattaccatccgagaagacgacggcgtcgatgacagcggcatcgtacagaaccgactggtgtcgatcacacacaaggacgtcaagatggagtcgaacacggtcatgttctcgcagtacttcgaccgcagcacggacaagagcaacggcccggcggacagcagctacgggctgatcgtcgccgactttgtggacgaggacgagcgccacccgtacgtccccaaccagcgcgtccggagagacgtgaacgccgtgctggaaatccgcgagttctctccccagcgccccaagagcgtggcaggaggccctccgtcgtgcaaacccgttgtcgtcctcagtcggtgggtccagaaccgaatgcactaccccaagttccccgtctacagggacggatggtacgaacttcgagacaacatggacttgtggggacgggctcttcatcgcacggtagctgaaaacctacgggggcatccgtaaagcctcacaatcattgtgacaatggcttagttctgcagcagcatggatgcagcgttgtttgctctgctgttgtgtctcaaccatcaaccacctgattggcaaagacaggtcctgggattgtcattgagacttgtcacctccgccgatgcagcgactgccatcaatgaggcgccacgacggcgcgttccgagcaggagtggcgtcgtccagcacgtcgtccacgacctcgtctcctctgagtgacagcgccgccccgacgcgctcgtgggcgtccataatagccccgagacacgacgaggatagcgaggtggaagacgcgagtgagacgactcacaagcggccgacagaagcactgccagagctacaagtcgatggaaaccaaggcgatactggcacagagtcagcggagagcgcgcagccgaagcgcaagcggaagcaccgcaagggcacccacacgatcagaaaggtggcgatggacgcggaaggagtgtggtcgttatggcagtactgacggtgctttttgactgtaattgtcgcttataggaggagaaggagaggctcttgaaggagatggagattctgcagcaggagatggcggcgcttaagaagcgagcggttgatccgaccttcccggtggaccgattcgtgcgcaagtcgcggcgccagattctgcgcgaaggagttcagggacacatggagacgttctgccgggcgctgtccattatgtcggactacacattgtgcgtacgtatcggtgggagctggtagtgctggcgctgagacagagaattattactgatgacttgactcatgtattgtagaatatccaagcggggacgcctctgcaagagagaatcgtgctcaagaaggattcccactctcgccacgagacgctgcaagcgatgaaagagaggaagatcaggaacgcccagcatttcttaaaaatgcgccgctccaaccttgatccgtgcaaggccttgacggaggatcagcgcttcgagacggacagtgggggctttacctcaacccacttcgccatcatgcagttcgagggcgcgcagagcgtcaagcaggtcttcgatctggttatcttttacttcagcaacatggagatcagcgtgtccgagaagctcgagacgctcgtcacggtccgcgagaacgacgacgacagcaccatcgagggcatcacgcagaactacctcatgtccacgacgaccaacatgggcatgaagatggagtccaacactatcatgttctcggagttctgcgagcgcgacgacatcccgtgcgccgaccgcggctacgggatcgtggtctcggagttcgtcgacgtggacgaacgctacccgtaccggagcaatgaacgcgttcgcaaggaagtgaatggcgttatcgaagtgcgggcgtacaaccgcccgagagcagacggagacagcgacgacgagcaggagatggtcgtcgtgatgactcgctgggtgcagaacactttgcatcgacccgagttccccatggccgtcgaaggctggcgagagctccgtcactctatggacagctggggactgctgctgcatcgtacactgctcgagagtctgcacacccacgcgtaaatgacgaggctacttgtttgtacactgtaccgcaatctgcttttggccgaacatgtactatgtgtgcaagttgccttttgctagtcgtgacagacgtacttaagcgggatttggattgcgcaccgattgcgcgcagtgcaggccttcgagtccttccagcgcgagtcagcgaacgaacgcgtcggtgctagcgggggagtaagagagcggaaggaagcgatggatcgttgctggggcatttcgtccacgccggatgagcctcagcagatggaaattatcacgacgtcggatggagcagcggagagagcgaccgaggcgcgtgccggggctccgctacatacagcgttggggaaaagacatgcagcgaccagcccagccgggctcgatgaggtgctgggtctgtgcgggggaaggaaatatagcgatgaaaaggatgctggagtcgacggcaccaagtcggacacgtcacagaaggctgcgaccaagccgcagcgccagcggaagcatcggaagtcgacacacgttgtccggaaggtgtgtgattcgtgctttcaaataggtggaggctagtgttaacgagagtctgtattgctgctgctgaaggaggaaaaagcgcggctgctacaggagatggaggtgctaaatgcccagttggtgagcttgaagcagcaagcgatggcatcgatgggcaatgaagaccctgacacggcgaggagcattcgagttggccgacagctacgtgatgatgtacaggcgaatcaacagcggttcggcgaggtcgcgtgcatcatgtcggaattctccatgtgtgtacgtaaaatgatgtggcgctgtcctgatgtatcctcatgaagatcgtattctgaactgcgtatgtactcaatgtcttgcagaacgcgcgagctgggtctccactgcacgacacaatcgtattaaaaagagatcgagactcacgccgacggatgctgaggggcatgaaagctggcaaaatggcgcaggccgagcacttcctacagctgcggcggcccagcacaaacctacggaagatctgcgatgaaggtcggcgcttcgagatggacaacggagactttttctccgagaggttgacaataacccagcttaaagacgcccagagcgtgaggcagatctacgacctgttgctgttctactacggcaacctcgagatcagcatctcggagaaaatcggccacatcacagtccgcttggacgacgacaatgggagcaaaagtatcacgcaaaatcgactggtttcaacgacgatcaacgacctaaaggtggagtcgaacacgagcacatttgcccagtttcatgagcgtgatgaagcgaagagcaatgctcacggagacggcgactacggcatgatcgtgatggactatgttgagtcggacgagaagtatccttaccagccgggccagtgcattcgaaaagacatcgtcgcagtgattgaagtgcgcgaatgcaaggaagctgatgctcgcaagactgtggtgctcactaaatgggtccagaacacgcttcgccgcccagacttcccagttgggaccaaggactggcacgagcttcgcgaccgcatggacctattcggcaagacgatgcaacgcagtctggccgaggacttacatatcggccttgggctgcctgtcggcgagtagtcgagtgaagcgacagcttaagcgcgcaaatatgctacgtgaacgcgactactagtataatagtaatacagataccacccagaaactgcaaaccgtataaattgatacccttgtggaatcatgatatcaaggggcatcatctcaggagggagcgcccgtcacattgaagtaccgccactgtgtggtctacatattccattttcatttgaatcatcccgccaaaagcatggcgcactttttccacagacaaactcaaggcagcactgagcagaggaccagaagtgatctaagggcacccagaagcgtaccaagggtgtgtgactaaccatccagcagaagtgcgatgttattgaggagtatcaacctctctcttagaagtaaaaaggattcttagacggaattggttagacaatcgtcagacgtgaaaattcgtatgatgttggataggatattgatgacgttggataggatagaggtatcccttgaccgctttagttgccgcagttgccctacagtgccaactacgaagtgcaactagcagtgcgtagttggcactgaagcggtcgagttcttgcctcagtacgcacacagtctcgccgttgtgtggccattaattgcagccaaacaagtcgtttccactactatgcattaagacttggttgtgagcttagcccttcatggtgagtgctctactgtagcccagctcaactgtccgcccaattgctcctacatgtatcgctaagtagactcagcaaatgcggcactaaccgcgtaacgcatgcagagacgcattgctaggcttcgacaagctgcagatctgtccctacttgagcccaactacctcatgtactctattgcctggaatacagtgggggcccacttgggcctctcgaactaacacacgcgccaacagtagattaccggcggtaaaatccgtcgattgtacagtagttcagggcttttcaggaatctttataaacgcctgtgattacttgggagagtctattacattttgtgcacaggcaactcgaaggcaccagtcttgcaggcctgcatgcgcacggccaagtcgctgtaaagcgcctgcacctctgcgcgcaacgtatcgtaagcattgtaatatctcgtgggcgggtggcgtgccgccaatcgcacgctctgtaatactgctacattactgtccttgttacttgaaaatgctcttgaacgcgaggcgtgccttgttggggtatgcaaggccgagtaggaacgcttgagcgcgcacaggaaattggtttgctacccatcatcgacaacttgtctaacggatttggtgcgaaagacgatttgctagagtagccacacaattaattagggaagcgaatcaagactttggaaaatggcagacacggcgtctagcgcaaattcagatgtggcccacattgtcatacgaattttggggaatgagcttggaggaaatggtggtagtaacgcacctcaatcacttatctccttagattatataatttcctgtaggaacttggatgtaccactctttgcagtttgtgggtcgtatctgtaccgtgttcaacaggtcaactacatccatcaaaagagagacctgtttaacttcccgtctcaaactcaaaacctccgttaaaacataaaatgaaatctgttcacgaaagtctgtatcggcattcacaacaaaaatacatacaggtacctcacagcattgtggccaacacaagtctctactatccatctatacagacctttccaattccggtataacaaacaacaggctcattgcaagtgccccgtaatcaccgtcacgcgcgtcagtcctcagtcgacaacttgccctcagttgctgcaatgaaggccgcttcctccatgaactcgccgcgcacggacgcggacctgtcatcgtcctcgacgtccgcctccccactacaccccgagcccacgcatcgcagcaattggctctcgtccggaggaggaggagaaggatttctgccgctgctgcgtgcggccaatgcgtgtgctccgatgactgggacaccgcaccacaactacctcctgccagtcacaaacctggcgactactaagcgtcaatggcagacggagagcggcccaattgcatcgaggaactgggactcaccacagtgggggaattcccccttggcggtggagtcgacgggggtggtccgtccgacgaagaggagggcgactcagcatgcaccagagagcagcaagagtgacgaggatggagaggaggaggaagaggttgtccaagtggttaaacgaaagaagaagcgagggtaccgcaaggcgacgcatacgatccgaaaggtacagtggattgtctgtttgcttttgaggtggattattggtcgactattgacaccgcgcctgtgtttcttgtacttaggaggagattgatcatcttcgagcagagttggctcagctgcagactcagatggcagagctacagcagcgcgcgttcgcgcccgatcggaatgacgagaacgaggccgagagacgtctgtactcgaacatactccacaatgctgtaaggaaacaccaagaggcctttgtggagatccaggcggcgatgaccggctacgcagcatgtgtacgtttggtatctttgaaatttacgaaatatccgcactggtagtgggattctaaccactatatcttggatcactgcagaacattcaagctggaagtcctatccagagaacgctcaccttaggcaaggatgagctgtcaaggaaacgagcgctgcgctcggtgaaggccttgaagttgcaagacgctcgcgattttttcagccgacgactgtcccacttgaacccgttgaagtcgatgtccgaggactatcgatttgagagcgacgaaggagactactgggctgtccggttcgcgacctcgcagttcgagcccgctcagaacgtcaagcaagtgttcgacctcgtcgtttactacctgtgcaacatcgagatcagcgtctcggagaaaatgggccacctcacagttcgagaagacgacgacaacagcgaagaaggcatcacgcagaaccgcttggtgtccttgaccggcaaggggcttcacatggaatccaacacggtcgtgttctcagaatattttggcgcgactgggccggatcagcacgatgactatgggctaattgttgctgactttgtggacgaggacgagaggcacccgtacagaccggccgagcgcatccgcaaggacgtcaacacggtgatggaggtgcgttcgtacactcggcgttcttctcacagcggagttgatgaaaaggtagtcgttctgacgcggtggtcgcactcccgactacgccacccaaacttctccgtccgcaaggacgggtggtacgagctgcgtgagaacatggatcgctggagccaaaacatgcacaacaccatcatggagagcttggacccgagcaaccatggaccacctacatggggctagactaaaggttagcaaattattagtgtgggtttaacagagatcacctgtcgaataaaacacaaggagtttatttggcagatgagtaaaacccacacaaaacccacaataaccgttatctcagacatttcgctatttgtgtcttgtaaggggcgttccaatggtgttcggctcatcgcgcgaggaaatccgggacgacagctactacaggtcgctgctgctgggtccgcgcgtggccctcgtcgtgtctccgacgtccgctccgcccccgcctagcagcctggaggatggatccgcgcacacgcttctggcgctaaagacgtcgtttaacgacccaaaccccacttccccaaccacccaaaacggagcaatcaatcgaagacgcaagcgtgaaaaacccatcgactcggagaacgacagcggcacagcagagtcggagcctcaagagacggagaggagaacaaccaagaggaaataccgcaaagccacccacacgttgcggaaggaggagaaggagcggctggagaaggagctggacgctcttcatgctcggatggaggagctcaagaaacaggccttagagtcttttggaacaccggggcaaaatgacaaggacagagtcattgcctgcaaagtgctgcgggatgccgtgcagacccagcaactggagttcgccaatatccagggcatcatgtcggagtatgcactatgtgtacgtttgtgatttattgattacagcccatttttccgcggttgctaattttctttttgtgaaatgaggtagactattgaagccgggagtccactacagagatatatccatttaaaaagatatgaaacatttcgacaagaaaccttgctggagctgaagccaatgaagttggaagatgcagatcagttcttgcgccagcgacgacctaatgtggatccgtgcaagccgatgtgcgaagatcgtcgctatgagctgtcgaatggagacttttgttcgacacgattcacgacgatccagtttcacggcgtgggtagcgtcaggcaagtgttcgacatgctggtccagtacttttgcaacattgagattagcatctcagagaagctgggacatataacgattcgtgaggacgatgacaggcgtcactcagaaccgactggtttctacgaccattaacggtttgctgatggagtccaacaccgtgctgttctcgcagttcttcgagcctggtaatgaacccggtcacgagagagggagggggctgattgttgcagattttgtggacgaagacgagaggcatccgtacagaccccatgcgcgcgttcggcgcgatattaacgccattctcgagttgacgtcgtacacacgcaaagttgcggctatcggtggcacattcagcgggcaacagaatgccggacaggaagggagcgttgtcgtgctgactcggtgggtattttcacagctgcatcgaccctccttcgcggtatcgacgggtaactgggaagaaatacgcgataacatggatcggtggggtgaaacaatgcaccgcacgatggtagaaagcctcacccccaataactaaacagcgaatttatttctgtttactgaaatatacgcgcttcaatatttttcaaagagcttatataacccattttgggttatttgcattgcacaattttgaccgattgggtaaagtattccaatcagcaacacatgacggagagacaggaacgcggcggccccaagcgccgcagaccgtcatacctcgtgcgacaggatgaggtgaagaagctcaagacgcagctggtggcgctccagaagaagctgacgcggctccaggcgcgtccacgcagcgctcgagcccagatcctggacgtcgcgcgcgccaacaattccctccgagatatcatacacggtcagcagctggcggtggccggtgcgcggtccatgcttgctgggatgcaggtaatttatttttgggaatttattttctactttattgaagtagtatttttcatgtgggtttttcgagctgaaacgtgggattaatgttccgatgccgactgtactaggagaggcagcctagcagcccgctgtgcagacacatccacctgccccgagagtggtgggagcgacgccaagttctactgggactcaagagcgatatgatcacgcgggggtgccagtacgtggtagctcgcagccagcacctggacctgatgaagccgcagctcatggaccaccggtacgaagacgcgcagggcaacttctgctgcgagcggttcgagttcttccacttcacgggcgtggagtccatccggcaggtgtttgacgccatcaagtacttcatgctcaacatggagatcaccatctccgaggcgctcgggcacaccaccgttcgcgaagactacgacacggtggacgacggaacgtcaatctggaactatcggctgctgtcgacagatagccatgggatcacgtctgaggtgaacaaagtggtgctgaccgagtactttgacgagtcggagcagatgggcggcagaccctgcgctgtggtggtcacggacagtgtcgacttggacgaactgtacccgtacgatccgcgagagagggtacgacgcgatattagcgctacgacggtgctgactgaaatgaggcgcaaaaagcagaagcggtcgatgtcgacggagagtgagcagagtggcgataacgacggaagtagtggcgatggtggcacaagacgtggtgatgcggaggctgatcgagacgatagtgaagaggaaattgtggtcgtgatgcagcgagcagcgttcatgaagatgcacaagcccgacttcgagatctcgagaagtgcgatgcgctccctgaaggaaggcatagcgagctggggggaggtcgaggtgcaatcgatccgaggcgccgttaacgcatgattggcctcggctactaatcacggtggctgcgtgctcaagctcgtcttgtgtggaaatattcaatcttcccgaaccaagttcgtaaaatagtgattttattccaaagtttgtatacaagaataagaatagaagtagaggggctcccgataatgagcttaatcgcatgtcagtttcaagcctccttatggtactaaccgacaagaaacacccatcagatcgctcgagcacgcgctctgtagactgttcgcagttcgaagaactgtgttaggcggccccagaaaagtttgacatcctgcaacattacggacagtgattttaagttgcttgaggtagccatgtttggttacactggtgaaggtgtcgatctgaggatcatacaaatttcatcgaagcggcccgagttaagaatatagatgctgtacattcttgaattatattcctacattccttcaattacaataggttttgaagtccgttaataaatattttgatgctagtagattttttatagcgcctgtggttcagaagtagatggtatgctgagtagtaataataaactaaaaggcaactcaatgcactactgtccgactcatggctaaggcattaaatgcagtatcagccaaccgaacggcactcaaagcatgcgagatgttcaaaacaaaatacttgtacactggaaagcccagttaatctagatcttttattattataatgttgttgttgtctggtccagtgccccgcaaaaatgtcattgagattcttagtgttttctcaattttgctttgcctatagaatatagtgagatgcgcagcacttcaccgccaatggactgagaggaacaaagtttgtttcgaggatggaggaccggaaccctttgaaacagcgatattgtagtgtggtggctcgtccctcctctgaggaacacgagcaggatctgcggaacagcgtccaggtcgtgatcgacttgacggagtagctggtgtggcacaccgagcagcagttggtgacgaagagtgtggggacggcggctagtggtgacggaagcgagccagtgggctaccgttacgtgcgacaggaggtagcagttgaagttgacggctgcagaagatcgcaaggcgaggtgatctgtgaacaggacagagaacgagtatgcagagaggagaggtgacgctggagagcgagtgtgaggccaggaggccacgaggaaagagatgagggcccgagagggagaggtccaagtaggctagaaggcgccgagtggataggatagggtagttcgacgggggttagaagtaagtgggggcaacgagctgcggtgtggcagctcgaccctcagttgcgatttgttgctggatagtaacgagtcaagacttgtaatacactcagttgcgccgaaacgcgggttcctgtgacctagtaccagggaagtgtcttgcgaccagggaagtgtcggctagacacggaggtaagtggcataaggtatgcgatagtggcgggcggtacacagatgggggcgatgcattgagtagggtagcgggaccacggagagaagccgtgggggcgcgaggtgcactcctggcagcaccttggccgtgaaggacagcgctttcgagtgcttgggcgtgcccgagtgacgtgactgagatgctgttcgacctgtttgcatgtccggtgggggtcgcctgtggcttgccggagcccaggtcgattgcatttgccctcccagccgtccctatccccgacacgcctggtgaaggggtcagtacctgtctggttgatcatcgtactgcctcgtacctgctggcagtcggcgctatactggcctacctaggcgtggacgcgacgacaacaacggtgtaagttcgtaagggtggacgcgtgcaatactatgggcgaccgggctagacgggacctggttacctgtggtagacgcggaactgtggtgtagcgggatcggccaaaatctggttaaggcctgatcaagcttcccaccagcgcccagacaccgactaacggagggggtcccccaacgatccgtgatcggctgaacttgttctcaccttgtgtacccgtcggcgggctggatctgctctctcggggctccgaagattcagtgcttggtgaagatcgagtgtcttggcgtgacgcggggatagtttgtggagcagcgcggtagtcttcgctctgcgtccgagtatacgctccgatcgagggttgttcgctgcgatcggtcggcctggagttgatccaaggcctgtggttgcctttccgggtgtgttccttcctttcctgagttgcttgccgcttcctatagcgagatcgaggttgatcgagaggtgaaacgatcgccggcgaagcaccaatacccggtcgatcgaggacttgcacacaagagatagatcactaaagtaggtcaagctggccaatgtattaatccagtcttaaccgtaccgctagttcactacccaaagtgtcgacgctgccgaggccaatgtagttcctgggacttggtgacttgatgggacttgtggtcttcggtgcaaattctgctccgatttatgtttagctggtctctccctaatgctaccatcttgcttaccctcctacaaccacacaattactggattcttgccccgacttcgtcctccatgtgcgtcccatcctggtcgatccacgatcggccccgatcggcgacccacgatcggctcccgatccatgatcgaccccgatcggcgatccgcggtcgatctcgatcggcgatccactcccgatccggttgccatgtgccgccgatctatcaccttctgtcctcggccatctcggatccgcgggttctgtcgttgatctggacttgggtcggccacgaatcacgccgcggttcgggcacgatcacccacaatccggcttgccacatgtcctgccttacgcgccggcgtcatcggaccacctgagatctcccgaagaaccccttctgatccgtagatccttgatgcctgtctctcgatcgccgatctcccacgcctccagtcgatcggccctgccgcctttctcggagaacaattcttattcagcacttctccacagaacactacgggcggtcgggctggacgggacctggctacctgtagtaagggacgaccgggctggggatagacccgggagcttcctacatggtggtcataaacagaggctctctgggcttgtcaaaaggagttgacatgcgagctgagctttccgtgggcaaaccccgcagcgtgaaagagaattggaagagacagaggattagatgagatgagcgtgaggaatggggaactgactgagatgattgtgattaattgtgttagagctaagagaatggctacgaacgtggtggcatgtgacgaacgagcgcagcgacgcgctgcatctgcggagcgagtggctgcggaagcagcgagaagagcgaaggagacgacggaggtgactgtggacaccggcgacagcggcacgccgacactggaatcctcggtaatcaccagcacgtcgggcgacacgccgctgggatcggcgagtgacggacgcggaggtggccgtggtcggcccggacgagacgatggagctggcagtggtcgtgagccggccgggggcaacgacggcgaacggtccaccagcggcagcagtggcaacgtggctagaagcaacttgactggaggcggcacgacgccgacagcgggagacggaggtcgacgtggcggcggacacggcgatgacggacacggtgatgacgaaaacgggggtgacggcggtcacggtgagcgggttggtcaacgtgaggcggccaccagcttctccggcggctacgtcgacttgacgggaactggaggtggcggcggacacggtggcgctggtcctgggcgcgcatcgaccccaccaccgacacttggagcagcgagaatgagagcggcggcggcacccatcgtcgtccgtgagaaggcgaaagcactgaagttgacgaaattcaaggggcttgacgacacgatgcccgtgagcatgtggctcaagacggtgcgtcaagaggtgcgtcggcaggcggtcaccatggacgtcgagtggaacgagaatcagctgtaccacgaagtcgcgtcgcacttggagggcgaggcgaagcgctggttctcgatcgtgatggagtcggtgcagccggaagaagaaagcatcaacacgctagcagcgatgctacgcgcgaagtacatgacgcagcggtcaggccccgaggtggtcgacttgctgaacgcgcgtcggcaaatgagaggagagcggctcgttgactacgcgcaggcgctgcgtgagatcgccgagcgtggcgagatcggcgacgattggcaggtcagcgcgttcttgaaaggcatgagcagcacggagggggcgacgcatgtgcgcggacaccggccgaagacgctggacgaagcactgagtgtggcgattccccaggtcggagactacggcgaaggatacgggatcagactggaggaggcgatggccgcgtgggacgcgcgcgaggccacgagcgggcacgggcccttggcggcggcgaaggcacgcggcggaagagagcagtcggcagttggcggcaactcgtggaatgtggtctcggggtacgggcccggctggggtgccgctccgaagccaccacggtacgatactgaggggagaccggtggataccggtaaagccggtgcgggtgagtggtggaaggccatcccacctggttttcaactggtaccggccggtacttcaagtggtaccactggcggttcaaaatttcaaaccagtggcggtgttgagagcggcaagcggcaagcgagcgaccagaacacgaagagaccggctaagaccttaaaggtcgagagtaagtacggaggaggagcgcagagatcgggtagcggcccgagcaatccggcgctggccactcgagaaggacgactgcgcaaccatgagcgctacatggcaagcagggcgccacagcgagcgtttgtgccgagagagggcacagagtgctattactgcggcttcgcggggcacttcgcgcgcaactgcacgctgaagcaagctgatttagcggctgggggcgcgacggtaggaggcagagaacgacgggaacgggtcgggaaacggtccgcgagcataagatccccggtcttatcgctcgcaagacctgatccgggtaagaagttggcagcaggacgagggcaggccagcgggcagcagcaacggctcccgcgtggcgctgcgaggacgagtgcaacggcgatcagaagccggagcagcggagtgaagaaagtggcggccggagcggcgaggaagcaagtccggcacggcgtggttgagactggggatggcggtgtgctgcgtgcgcggcatgctgctggtggacgggcggttctgcagtctggggatggcgcgacacatacagtgcccgtggccgtcacagcggcggataagaaggagttgacgagcacgggtgcgaagccgtgtgtggtgacggagacaaagcacgtgcggttcgcggtggccgaggacggcgccgaggaagagttcgtcagcgaggagcagacaccgatggcgaagacggccaaggacaaggtcgagaaggtggtggacgtgggcgacgtgggcgacacgggcgcgggcaacatgaagcgcgccgtggtcgacttggcgtgcgcgagcgtcaggaagtcgaaggaggagctggaggctgcggtgtccaagcagctggacgagtggctggagcagttcggcgcggacggcacgatggtcgatgtggcgaacaccgacaacgcggtgacgaacggcatagggggtgacgacggctcgcccgagtcggtgcagaaggtgatgacggcagaagtgcggcgacaagacgttatcaaggccaaggtgctgcgtgtgaaggcggctgaagtgatgcagagagctgtgcgtgccgacgaggaggcacggcacctgcagaagcgacggaagcggaaggagcacgagcgcgagcggcgtgagcgacgtgctgcacgtgggcaactcgacggtggaaacaggcgacggcgcgaggctgtggtgatgtggcgattcgatggcccgcggggagcagcccgtgccccagtttgtggcaatggcagcggacaccgaggtgacggcgaagagcgacggagctcgtccgcgtgtcggaggaccagacgggtatgagaagttggtgcgcaaggcgagggcgcgtgaggaccggaagctgcgcaagtggctagcgacgcagtcgtacccggacgagacgtacatggcgttcgtggacacgaagcggcggcacagcaagggcgggccacgactgttgagtatcgaagaggcgacggcgatcggattcacgccgccgaaggcaacgacggtggtgacgagggtgacgcggcgaaggatgccgaagagaagctaccagtacgagagtggcagcgtttacgcggccccgagcgtcgtgtggacggaggacggtgcgagaccagcacgagttggacgactacgagctgtgcaggccccggcggtggactcactgccaacggccaagatcgagattggagacgagtggcggaaatcaagttggacaccggcgcgcagttctgcgtggccggcgagtcgtggaaggagtacggcgagcggctcggcacgctgccacccgtagacttcgtcgaaggattcacgggtgcagtggccaaggtcgaaggagtgtggcggttcagattcaggacgcagtacgggcagtgttggtggacgcgctggtggtcgaaggcgcggccgaggagttcttgctcggcgaggattggatgctgacgaacggagtcaagattgacttcacgtcctgtgagatgaaatggtatgacggagtcgacaagaaggtcgtgccgttcagctgcacggcggagagcgaaagcgaggggagagcagtaaaggtccgtctggtgcggaaggagcgagtgcagacgcggacgtgccgtcgtgtggagctggcagtggcagcacctgagggcactgtgggtttgttcacgcccgccctcggtgtagagccgcacctgttgctagcacccacattgacaacagctaagtggtcgttccgatcatgaacttgatagggcgtacctcgaagttaccgtctcgcgagaagctgggaacttcggctccgacaactgaggacatgcagaccatggaagtgaccggggattcgacagagagcgcgtgaagcagtgacggcaggagaacctacacgacgagaacgcacctctgagcaatgaagacgagctgaaagtcggagacatggacaaggaggacagggagttgttattgcggatgttaagacactaccctagccacgtgaggggtgtccacctcagactacgctgggtgtgagtcaccagattcacacggggagtgagccaccgatcaaagtgcggccgcgacggcactcgcactcggagcaggcggtcattgacgaacagacggacaagatattggcggacggagtgatcgaggaggccaatggggcctggggttttcctgtcgtgttagtgcgcaagaaggacggctcggtcagattttgtatcgattatcgcctcctaaatgctatcactaagaagaacgtgtaccccttacctcgaatcgacgacacattggacaatttgcatggagcgaggcgtttcaccagcctcgacttgcacgcggggtactggcaggtgcctgttgcagagaaggatcgtgataagaccgggttcatcacaaggaaggggttgtttcggttcgtcaggatgccgttcgggttagcgaacgcacctggcacatttcaacggatgatggacgctgtattacgggggcttacgtggaagagctgtctagtctacctagacgatgtcattgtgttctcgaggggcagcgtagcgcagctggcagcggtgatggagcggctggcgagggcaggcttgtcgttgaaggcgagcaagtgctcgtttgcatcgaagaagttgaattatcttggacacgagttggacggcgctgaagtgcgcccgatgccaagtttggtcgagagcgtgaagaacttcccccccccccggatgcgacggaggtgaagaggttcgttcacatggccggatactacagacggttcgtgccggagttcgctgcgaaggcggctccgatgactaagttgttacgaaagggagtggtctggcgctggggagagtctcagcaggctgctttcgagtgtttgaagaaggcgttgacggagaggccgcttttggcttatcctgactttacgaagccgttcagattggtgacggatgcgtcacaggtggggctcggtgccgctcttacccaggaccagcggcaaggcgagcagccgattacctatgcatcacgaatcaactcgcctactgtggcaaagtacagcattgcggagttagaatgcgcagccgtggtgtgggctgtaaaacttttcagaccgtacctctatggacgaaagttcgtgttgatgacggatcatgcagccttgaagtggctgatgacgtcgaaggagttgacggggcggttgcatcgctcggctttacagctccaggagtacgatttcgaagtagtgtatcacccgggcgctggcaacgtcgtggcggacgcgttgtccagggcaccggcgcagctgctgggcgaggagaagtcgagcagcggcggcaaggacgaggagaagtcgagcaacgagacgaaggacgataaacagcaggtagtgacggccagctgacgaaccagatgatcaaggacgaacaagcacgggatcgcaccgtgcagaacttggtacagaagggaaagtaccgcgacagagagatcgtggtcgagtacggagtggtgcgcatcgtggagcgtgacggcagcaagcgggtggtgctccccaccgcgctgtgggcaagtgctcttcgtgagagccatgattcgatctacgcgtgtcatctgaggacaccacagacgtatgcacgtgttgctaggagttactggtggccggatatgcaggtgcatgtccgccggtgggtacaggcgtgcagagattgcggcacgcggaaggcgaaggccaaggaagtgattccgccgttgaggagtcagggcgttggtagtccaggtgataggtgggttctagatgttgcggggcctttgcccgtgacggcaggcgaaaatcggtacgtggtggcggccgtggactacgcgaccaggtacacggtggcggcagcagttccgcgccacacggcgccggatatcgcgaagttcgtcatggagaagttggtcctagtgtttgggccgatgcgtgagttggtgttggacggagcgccggagttgagcggcaaggtggtcgaggcgttgacggacctgttgcaggccaggcagatctcgcctgtgccgtacaggccagcgttactcggtctggtagaacgattccaccggagttggaaggacatggtgtccatctttgtggcggaagcgcagaacgactgggccagatggctccgctgcgcagtgtatgcatacaacggggcacgacacacggcgacgggaattaacccgaccgagttgatgatgggtaggcagctgaggacgccgaacgatctcttgcgcacggcgggcgtgacgcagctcggcgagtttgcagcggaccatcgcgcactggtgcagcagatggcacggtgtgcagcggcagcgaaggcggtactggcgaaggaccagctgcaccgagcaaagtattacaatagacggcagagatcgacgacggagttcggcgtcggagatttggtgtgggtgctcagaccagggcattaccaagcttgcccaccagtgggtcggcccagcacgcatcgtagaggacgcaggctttgacaattggcgcgtggtgcgcaaggacacgggtgagcacctcatggtgcattgtagatttctggtgacgagtcggtgtccaagcgactcgctcggacacgtggcggatcggatcctgagggagctggccgaggacgaggatagcgcagcgacggaaacgagatcaggcggtggagatggcgcccagagcagacaacacgacggtagtggcatgcggatgcaggacgaggctagcgacaacggccagacggacatgcagtcggtgggcgtcggaacggagacgcaggcggagaccagtgagcaacggcagagcgctggaagtgcagcagcaccggcaatgagtcagcgtaccgctgggtcagtaccaacggcgacgggtcagagagttgacgcggggtcggcgccagcaacggcttcgacgggagctcgtactccaggaatagcaggacgagatgctgttgaggcagcaaggccagcgacaaggagggacgcagcgccagacgcagtggcttcgccacaaaagaagcggcgtcggaagaggaaggtgtcggtggacgaaagaccaagggaggcgatgagcagccaccagtacagcataccggtactccaacatggtgatacagtacgatatttgggatattatatcgggacgggcccaatgacggattacaattgggcggttcgcatcaggaatatacggcgcaggttggtgacggcagcacaactggcaacgagcgttgaaatgcgggtgacgctgttgaacgttatcatgatgccggcaattttatttacagcagcagtgtatgacctgccacactgggcggatcgcgaaatacggaatcttcagaaacagtttctctggagacactccactagctcagaccccagccgacacaaagtaagcccagccttactttatacgccaaagcaagccgggggtattgggctggtctcggtgggcgtggctatcaaaactcagcggatgaaacatgcacttttgtggctcacccaacgactggatatttactatggggcgtggcgatcatgggcattctgaggggatgacactgaagtggggtcaatctctccacagcttctgctgctgcagcacaacagaggattggtcctttcagggaggaggctgcgatcggtgataggtggagggctcgcacccgactcggccaccgaactgaaaatgcaggtttatcgcgaaagccacatggccgcgctgttgagtgaaatggcgtgttggcgggatggcaacacactcgaaatcagtttgaattcgccaatacccgagcaggcgtcgacttggcgggaggtagacaagaggttttggcctacgttcttgtggagtgacaatccttggctacgggaagtagggggagctgttcttacaagcaagaaatatcatcggatccgagtgtgcgcgttagccgagctacacattcagcgaactggagtagcatcatactccatcgcaatcccgtctccagtacaggaaaccaagcaccacacccgaccaaagctgggccgatggggattggcggttcttcttggatcaccaccactggcgattgtggaggagatgcgggtcaagcgggagctgaatctacgacatcaaccggagttacaacatcaatatttctggacagtgaatgcacaaggagcagttagtggagtcgttctcgatgaccagcgacggaaagtcgcttcccttcggctgcaccagcacgaagatggtattcattgggaactcagagccaccattccctaccacacagcttagctgctgacatcacgaagctcgagaatacgcagcggagaggtgggttggtcatgcaggcacacccggggatacacagatacccgtgggaggttccagacacgattgcgaacagagatatcgtccaggcgctgaagcaacaaccataccgccgctacaaagggggagaagacaaagccgccttaagccgagtcattcaccgcctcgacgaacgggcaacacgaaatcgatggcaaaatcacgttatgcaacagacaccgaaagaactctggtcacacggcaatatgctgtcggagtatcaggtatgggttgcatacaggctggcaacatgccagttaagcctgtattttgatggaagacagcagaacaatagctgtcgcaaactcgatcgatgccaaggacaaaaggagacgttagagcacatattctggcaatgtccatgtgcccaagcgtgctggcaggaagtagcacagcgatggacaggtcaggtgcagagtccggagcgggtgcggatgttcgagagctattgtgcgtcacgatcggcacctccaatttctcaacgcattcgaaccaggttagccaccgtcttcgaaggtgaatcggaggcatacgaaggcgagtggaagcgtttgtggcgaatcctgtgcacgatctgcgtaacgtcactttggatacagcgaaaccgagtagtccaccaaggtggacgagtttcacaagaaagcagcgtaagcgaattcaggcaagcagcagggcgacacttacgagcgctggctaaacgagagcggaggaaaccgcacacaatggtccagggcacatggctactgctctgcctagatatgtatgactgccccctacatgagacaccacagcaagtggtgagccacgtaaggccaccgggctctttgaagacaccggcgctgatatcctggcttagggcttaccagacatcttgcacttaagtaacattaagttaatagaatagtctgaccctctctctatctgttgtcatgtctgctgatgaagtcgcctagatgtttggagtaccgaagccgttgtaaaagagagttgaacttggtttgatcttcggagtttgatagtcttaggaggcgccgattgttggagctgaatgtgctgtaaatggttgatattgtaggaagctcccgggtctatccccagcccggtcgtcccttactacaggtagccaggtcccgtccagcccgaccacccgtagtgttccacgtctaccacaggtaaccaggtcccgtctagcccggtcgcccatagtattgcacgcgtccacccttacgaacttacaccgtttttgtcgtcgcgtccacgcctaggtaggccagtatagcgccgactgccagcaggtacgaggcagtacgatgatcaaccagacaggcactgaccccttcaccaggcgtgtcggggatagggacggctgggaggggaaatgcaatcgacctgggctccggcaagccacaggcgacccccaccggacatgcaaacaggtcgaacagcatctcagtcacgtcactcgggcacgcccaagcactcgaaagcgctgtccttcacggccaaggtgctgccaggagtgcacctcgcgcccccacggcttctctccgtggtcccgccaccctactcaatgcatcgcccccatctgtgtaccgcccgccactatcgcataccttatgccacttactcccgtgtctagccgacacttccctggtcgcaagacacttccctggtactaggtcacaggaacccgcgtttcggcgcaactgagtgtattacaagtcttgactcgttactatccagcaacaaatcgcaactgagggtcgagctgccacaccgcagctcgttgcccccacttacttctcacccccgtcgaactaccctatcctatccactcggcgccttctagcctacttggacctctccctctcggaccctcatctctttcctcgtggcctcctggcctcacactcgctctccagcgtcacctctcctctctgcatactcgttctctgtcctgttcacagatcacctcgccttgcgatcttctgcagccgtcaacttcaactgctacctcctgtcgcacgtaacggtagcccactggctcgcttccgtcaccactagccgccgtccccacactcttcgtcaccaactgctgctcggtgtgccacaccagctactccgtcaagtcgatcacgacctggacgctgttccgcagatcctgctcgtgttcctcagaggagggacgagccaccacactacacgccatccccggctccaagatcgccctcgatcttgcgggcttcgagcagctcctcgaactccgctgctgatagccacctccgtgccgatggtcctccacgccgaactccatactgcacctcatgctccatctcatacctgccggtacgattccgcactcgtcgtcgcgcaatctccacgatgtacccagcagtgggcacctgcaacagttcgggcatgggcgctgctcgccgaggccgacctctgccccgtagcatctccaccgctgctccgttgccgtcaccaccgccccggtctgcctctccgtcttcattaccttcgtctcgctgctggtgcgcacgcacttctcgtgcgcgtccttgcccgtgttcgtcaccgccaccggcttcctgaccgccgtgaagcccacgatcaccgtctgcaccagtctgcgctgctgctgccgcttcctgctcgtcacgcacaacctgccgacgtgacgcacggcatccgcttcttgccgtcgctgctgctgcggaattcctcgaggctaatgtccgtgtttagaaatataagcctgctctttgtgggctggagagaggtccccgaatcttttgacgatctgcatcactctggggatgtatcgagcctggttgacgaatacggtcgaatcgtcgacgaatgccgaaaacttatgcactgcgccggctgtaccgggtacttgtaagccctggacgatcgtatcttgagctatcgctatcgccaagatttctgcaaccagtagaaataacaaaggtgcgagtggacacccttgccggatgccagaccgcactgtcgttggatctgatagttccccattgacaaggaattgcgccgttgtatcctgatgcattttccttagtacctccacaaatgctggcgaaaatccaaaccgcagcaatacaaggaagagaaactctcgcacaactgtgtcataggcttttcggaagtcaagtaacagaattgatctactcagctctgctgccaagtccggttcacctttcgcagtcgctacaatcgccatcatcatcataactgttttcatcatctggcgtccgtggacaaacccttgttgcgtctctccaattacttttcccaagattcgctgcactctcttcgccattacttttgctaagatattgtaaccggtttgcaacagcaaaattggtcggtagtccattgcgtctcccgaatcacctttctttctcaggggaatgatcacaccctcgagaaaaaaagccggtgggtccccaccacgaagcagctcgttgccaattgtcaccatcgccgggtccagcaccgcttgtgcatctttgaaaaagtcgttaagtccgtcggctccggccgccttgtgtcgattaagtgctgatatcgctgctatgacttcatcgagagaaatatcactcattagcatcgtgttgtcgtcatctgtcagtttccgttcaggtggaatcgaaacgaagtcgtctaattcctgatccagtgttgtgcctggtaccgttccgtgacacttgctgagaattggcttccactctgatgcaaatttgtccgctacagtcatgttgcgcccgaactcctcgccgttgatcctattgattcccgtcacatgctgatcacgctcccagtctgaaacccgtttgaattgccatctaagtcgttccgtggttcgttctagctgttgaccgattcgcatcatcctctcctccctgagttcctccacactggctacaatcagatcccgtcggctgctgaggtgctgtctcgcttgtgagcgaatctttgctccgtagcgctttcgtcgttgattcacccgtttccgcaccttctggatgcattggacacatttgcgtgcctcagcatcccacgtcgctgcggtagtgcttttgccgacttcctccataataagctcgttcataagctcatctatgacccggtagggctgggacgaacgtattgggtacgttacccgtcgactagtccggcatggagacggtgttttaccgtgagccatgtgtaatcgcacggtctgatgatcggagtgaagcggcggctctgctaccgatagccattgaactgcagccgtacaggtactaggcacgtagaatcggtcgattcgactggccgcgtgatagctccagaatgtgtaaaactcgattggttccggtggttcttcgtcatcaacatgcccggttagaatttgcgcgtcttccagtgctagctgacgttgcagttcctgtagcgctgcactttccggtcttcccgtctttcgtttgccgagtctatcgagatgagggttttgcacgctgttaaaatccccagcgagaacaacgttgctgcctccccatggccagctctgtagaccagtgaaaaatgcctctcgttcgtttgcttcattcggtgcatacacattgatcagtaccaactcgtccagttgcacggccattgcacgttccgaccacagttccggatgccacggagccggcagacatgacaacagattcaagttcggcatgtacaactacacttaatatcccgctctggtgtggtgttccgcactgttgtcgagtaattagcaccctagttcacataaattgagaagtcagataaatcggtaatcgaacacatcttcttcttggtggtttctcaatttgagaaagaacagcgtttgttggtgctgagcgaaacgtttttgaaaaaaaacgcatactagtagtgaaatttgagatttgtgacttcgcattttgccagttactcgaagtcacctcgtaattgttgttgacctgagtactccccgggagcaagtgctcctactccatgctaaaatatttcaggttcacgcggttacttgttctggagttgatcaagtcagtacagagagctagccctcctggtacctgtccccgagacacaactttacgctagccaacgtgtagctccattcaggagctttgcagacgtacgagcgcgcgactgcttcccgttttgtttttttgttttcttcgtggcaacatccaaattcattttttaaccctaagatacggcgacgaacgcttgctcggtgcaagcctcctccttccatgaacaacaatacctgttttcttcttttcgttgcttctaatcattggtcaatgagaactgcgaatttccgggcctcatggcccgggtttaatttgtagagtgctgcaatgcaacgagtgcttcaaggaagcatctcttgcgaatcttgtcatccagaacggcgttatggacaatcctatgcgcccgtctggagaacaccttagaagaaatgtttatctaattatgtactgtacgctcgcattcatgacagtgataattctaccgttcagttactctgttgatcctgtaatgcactgggtaggtatcaagactcttactttgagtggatcggtttgctggatattgcaagggctacctacaaacatgatgtgacgagtaatggccaagccattatttaatcattttggctacggtctgcatgagcggttgcaaatgacagtttatccacgaggatggtttgttctgtattttgagaaagatccactacagcgatatgcaaaataaatggaatccactaagtgtacactgcatggaatttctttttaagtaagatgtcttagatttcacgaaatttcggtacaacggtttggtcattttaaattaagtaccattattatacattttacaatcattattttacttcaaaaagggatgcccctaaaaacaaaaacaaaaactggcattcgcaataagcttacgatattaaaaaagagagggtttgcggcagacgtagcggtcatcattgttatattctgtcgtcgtttgctatatcattttgagctgacccacggttgaagtttagaaaattccattaagtgtgttgcgtatcttcacaatgtcagactgacccatctcattgttgttgtcgttgatgcagtgtcgcaatgctccacggggtcgccatctaaattcgcgtagcgcagttttgagttgccatcgcgggttgcgttatatcctggaacttaaggcggacagtaaaataaaataaacagcccggatatacaggcacacatcacatgcaggtcccaagctaacaacaagtaagtgatgtacagtagtgaatgtcgcacatgtaagcacaaaccagcgcgtgtacggctcatttggttttggctgcaaaactctttacgttcggaggaaaatcatgaatggtctgacgcacggaagccagattcattgtagacacctgacgccaatgcgatacatttcggcacaataggacagaccccactttcaaatttgccaaagctagaacacccaccctccccttgtcctaccacgagagccatgaagtttgctgccgtggccgtactcgcctcgctcatgttcgccggagcgaccgcggccggcagcgtcggatgtggccccgagcaatgttcgaccaagcgcgatgccgtttgtggaagtaacggagtcacctaccgcaatatgtgcgagttcaacaaccataactgcgacaacggtctgcagtggacggcgaagcccggcaattgcccgcgctaccacaggacggaccgcgagtaagaaggcgatcaagtgttcgagaagaagcctgcaacaaatttgaaaaaaatcataaaagtatcattttacgatcaatacagtgttgcaatacatgtatggctgctttccggttcattacttcatacttctagttctctcgattttatccgagttgttagggcgatacgactgcaggtgcaaatcactataaaaatgcatgctccgctatcggttataaacgaacgaatcattaacgtatcggaagttccgatacgttaatgacgtccgattcggaacgtacccgttaactttaataaacgcttggatattatattatctagcgtcgtgttgcttgagtcttttagggtcgacattcgcgtgacacgatcgatcggctccaaacataactgcagttgtgtttgcagtacaagtatgttcaacgatgttacatcggtgtcgccacgttcaagtcatggaacgacacctacgaacacccacgacttcaatttaaagtcgtgggtgtcgttgaagtcttcaaacgatgctggtctcgtttcaaccattctgcacgtgctcgtttcaaccattctgcatgtgcatacgtaccgttaccgccgcattcaagccttgacgttgtctgcatattattgcaagatagctatggcatagcgagtgaccagtacatgctcgcgtgaggacttgagatagttgtcagttcatgctttcatggtttcggaacttggtagcaaacccgaataaagacaaaagcaccaactgctgaaatttaaggatacttcgctctaactaaagaacctcgggcagaactgctaggcacatttaagataaattaacttagaatcaaacctagaatcaaaactacatgataaaatccagagcttctctagctagaatagctgctgtactgaaggaggcagaagaggaggtagtatgtgaaaccactaacgcgcaagctcaagtacttcgtgacaaagaggagctgtatactgtctgcgtaggatttaacatggagcatgagtagcattaaattatacagagacctgagcgcgcgcgtgacctccgcacggaatgctggattcgtcacttgcacagcaacagcttgtcttgtttcctgtgcatgagcagcccgtgtcactgtgctggagtacacgatccacgactagtcgtttcatgttgtcgtgtgagtggaacatgctgaggaaaaaccgatcctgctgcttttgggcgaccttgtgcggatacatgtgcagcttggccatcgtgtatcgcttcaccacgacgtactttttcccatcgctatcatcatgagccgtgagcaccacaccactggacatatcctttcttatgcgattcgattcgtcgtacggatggagctcatcgtggtcaacgtagtcggtagccagaacagctgagttgtctccaaatcgacagtaaaagacgccatttgactccatttccggcatcttgactgagttccttcccgtctgcttcggttgcgcgataattcgctggtgcataaagttacactttagagtcccggttgactgcagatacacataaaatcaacaattggcatccgcttgaagaagcaaaggtagcatgaagcgtacctcccgctgcgcagtaattcctatggcttcattcagagtttcgtctttctcggtgagctggttgtagatcccacgagcaacctggtaaatgctcaccccgtcatatctggaaatagtaaagttcacgcagtagtgtttgccgaacttgtcgaacatatccgagaactcgtggggcttattgcagtccattccaagcgtcttctgctcgatgaacttgtacgtcatgtccagcttctccttgcgcagcgacagaatagtctttctcctctcgcccaagtccttcccaaggcgaatgtacgactccaacggcgtcattaacgacatcctctgttcaccgcaaccaaccgtcaaccaaaaaaataaaataaaagttaaaatgatagcacaaaaactcaccacatcattcactggggcgaacgccagcatagccttgaaattgtctgcgtacatcttctgctgcgtcacaaacccgttcaaaagctggctctcctcctgactcttcagcaacagcttcatctgctcagcagcgtctcgtcctcttctcttcttgatactgatccattgcggtcgactcttgtccttaaactcgagaaactccttctgtgcagccagatacttctcctccctcttcaacaactccacttcttcttcctccttctccatcatctcaacctcgtcttcttcatcttcagtgtggcccgatgatgacgaatcacagtgagatagtttcaaaggagacatcaccccctctctgttagaaccttgcgtcaacagggggctctccacctctccatccgttcgacccggcgagtcttccagagcattacgccacgagctggtagcggggctcaagggcagcatcatgtccagatccggcacaatgattgcgtcatcgttctcctccatacctcgcagaaataattcgtcctccagtaaaaagtctcccagttcaagagaatcaaccggcgatgaaaaagaagaagaagaagaagaagagttggtgccgtcgctctgggggctgtcagcgaccacattctgcttgcgagagggcgtgaagggtgttggagcgactgtggagccgtcgtcgtcctcatccagcagctgcagcatgtcgtagtcgcgcgttaagtcggccgggagctcgacgcccatggtgtccagaacgagaatgaatttatgcgcgacagacgaaaaataacattagattgcgaaaattggcattaggtaatccttagtttacgtgaataattacgatagacgaacagcaaaacggagggtggactgacatgagtgcatggacgttttgattcaccttgctgttagcacgcaagcgcccgcagcgctgcaagcgttctagctacaggagagaatcgcactaaacaaccacttcgccatggtgagcacggagcgctttcacagcagctgccacataataatcggcagtcactcgctccatggaaatgcacgtccctggtcagtcctgcgcgtcttgagaggcgagcactccaccccacgctgctgacgcgaccaaccggggtaacagtcccggcacggggaaacgaaccacttgagaagaaaaaatgaaaacccgaagtaagccggcgagcgacgtcgctcacctcgaagacgccgcacacaacttcgcggacctgaacgtgtcgtcatacaggctaagccgctcattcctcgcctgcgcatggacagcccgtttcgttgcgctgcaagcggtccactatgagcgtcttcattgtgtcgtggcacttgggcatgctggcaaagaaacgatcctgctgctcctgggacaccttgtgggggtacatgtggtacttggccatcaagtaccgcttcatcactacgaacttcttgccgttggcatctgtgtggccggacagcaccacgccgctggaaacatcctttcggatgcggtttgatgtgtcgtacgggtgcaggtcgtcctggtcgatgtaatctgttgctagcactgctgagttgtcgccgaaacgacagtagaaaatggcgttcgactccatgtccggcattttgtctgcgtcctcgccctcccagtgcatacttgaaacgatgcgctggtgcatgaagttacacttgatcgtatcgaacgactgcaagtaacaacaagcacaaaatcgcaacagttagcataagaataaaatgtaagaacgcaaccagccctgacttgacgtacctcacgaatcgttgtgcttcccatcgcgttgttcagtgcctcgtccttgcctgcaatctgttcgtagatggcgcgtccaacctggaagacgctcactccgtcgtacttggagatggcaaagttcacgcagtagtgcttgccgaacttctcaaacatgtccgagtactggtacggctggttaatgtccaggccagcagccttctgttcgatgaatttgtaggtcatgtcgagcttctcctcacgaagagacagaatggtttttctcctctcgtcgaagtccttgccgagacgaatgtacgactccatgggcgtcatcaacgccattcgctgttcacaaagcaagcaattcacatcaaatcagagctcacgcaaccgcacagaaacacgctaaaagtcaacgtaccacgtcgttcaccggagcgaacgccagcatggccttgaagttgtcctggtacaccttctgctggttcacgaggtcattcaggagctggttgtcctcctggctcttggccagcagcttcggctgctccgtgtcacgcgggcgacgctgcttaatgctcttccgctgggggcggctcgacttggcacgagactgcaggaaatccctttgagcatccagatacttggcctccttctccaacaagtccatctcgtcctgaagtatcaacagcaaaccaattagaaacacagtgctccgactagtatctccaagtcctacccacgcacatccatggcttcctcctccatttcttcgtcctcctcgtcgtgcacctccagcatatccggctcgttggcagtctcctcgggcatcgaaggcatcggcgaggctgacacgctgccgtccgtgtggccaagcgacgacacatcggaggcctcggaggtcgtggacagcgtcgagttcgtgtgctggagtcctctgggcggcgacatggggggcagcacgtggcccatcagcgcatcgtggtacctccgggcctgctcctcgtgcttcttctgctcctcggccagcagcgggcactcgacgccgaactcgtcctcgtcgttcttgcaaggcgacccgtcggccgtgctcgggcacgtgctgggggcgctcgggcagggtgacggcagcatgtccaggcccgtgaaggcatccaggtcgatggcaccatcactctgctccagcgccgtctgattcttctgattctcgtccaagtctaattttaccaccttctccatgtcgcgcaggaactgctcgccgtccaataggaaggcggcaagttcgtcctgagtgttggtctccgccggctcgggcgacttggacgccgtggccgtcgagcagccagcgcctccggccgcgcaggccgacgacgcgcacgaggtggaggccgaggtaccattggccgccgccgcgtcggccgtggcgatgctcacgcccacggagcagctggccagcaggtcctcgacggtggccgaaggggacgcggagggcgccgcgtccatgtggaagccgccggcgaggtcgtcgccgtccacgagctgcagcatgtcgtactcgagcacgaggtcgtccgggagccccgccgccatggtgtctgccgtctgaggagctttctgggtatgaagcaggcaaggaaggcgagaccgctccaggtcgatttgagccgcctgcttgcttggcgtttcttgggcaaggcagtcggaggttgactgcgagtttgtatgcctgggttctcgaataggatggaagaaggggagaggcggactggctggaagggctcacttggtacagtgtgccgaaatatgcgacatggtcctctgagaggactcctctcgctgaaggtcgactgtcattggtcgagtggtacacatgtataatcatcatgattagatcgccagaatagggtgcaatctgtcgaaaagcgacgtttgtgggggtatcgctgctctgattggtcgacgcacttcaacctactgcgtaggttctacggtagttgaacgcccgactgagtccttacgtaggtagagcaggttaattgctgcagacatggaatcgcgatagggggcggtaggctgcgtctgaaggcgtttagttagctggtgcagcctgcaccagcttaacggccttgtcgctcaaaaagatagccgaccgaggtcgccgcagacgacaccaagccacgccggataacatcgcaccttgcgccatgtgcacaggcaaaattagccaacagtacgcttggatcaaaatgaaattgggccttcctcatgtcaaggttattcttagtgctctccagcagcagcacagcctcgcaaggtagctcttctctggcatccacgtcaagcaagatagggcgcgtctacctacactccatcttcgcagcaacctgcgcgcgtggaaaatggtgaagatccaccagtactggtcatggtccatgatcctgctgtcctacttgatctctacgacgggtagctactgcagtgagtcctgccttgttgctgttgcatctttctcaatcctgtatatatatattcacttcaactggttttgtcgtcgtagcgattcaactcatggagaattggcgtcgcatcgacgatgtcaagcacaaacgcgtgatgctcgtcctatctgcgtttgcgctcggcggctgcggtatctggtgcacgcacttcacaggcatgacggcgctagaactggacctcgaggacggctcagctcttgagatggacttcgagctggggctgaccatcctgtcgttcattttcgcggttctcggtgtacttgttgggctgaaaatcgcgtccatggatccgtacttcctcgagatggaagctgctaggcgcaaggagatgctggtacgtgggattgccatgcaaacaatcgcaatccaggcaggaagctcacctcttcttcatttttctccaggctgcaaatctgaaaaacgtcaaaatgtcgacagtagtgaataaaagcgcagtcacccgtcgcatcaaggtaagttagcattgagtgactcttagtgtgtgggggtccattgagactgaaaaagttgtttgccatagattatcgctctcttttcgagactacggcttattatgcttggaggggcgtttgcagcgctgggagtgctgggaatgcactacctgggtatgatggcgcagcgtatgaatgctaccatggagctcagcgccggaattgtggtgctctccgttttcatcgcctttttcactgccaacgccgccttttggattttgttccgagcggtaagtgagattggtgcagattgaagactcggtaccgacaatttcacactaacacctccctgtagctgacgtttatgcccgacagtgaattgttacgactggggagtgctctgatcatgggcgttgcagtttgtgctacccactactgtggcatgggagctgcgtcgtacaaatccagcagcgaaaactatctggattccacgcgattcatcatcaatcgctccgaagctgcaattgtggcctcacatggggcactgctgacctgctactggctggccagcttcagtgtggtgcgtcttgtgcgcaaatctgaaatgacaatgacagcgacgaccatgcgcgaaggtgtgtccaaacgagacaagagctccaagagccgaaagaacagcagccagaaagtctacgcggcggactgacatggctgccgtagctatcatatacttcaccagtactcaataccaatagtgcatttccactcattgatgccatatagtctgtggtttacgtgagatcattcagtattaaaacgcctcatggcatgcaacacgaggtctttcacacgaaggaagaacccctaaaaatactgccgccaagttctcagaatgtctgtccactcctttggtgctcgtcctcaatcgcccagctttagttaggtattcctcaatttcttttataggcggcagaacggcagcgtctagttgatcgaggcaatcatgtccagcgacgacgaggtgatatcgcaacactggctggtgtccaagattttcctctcgtacctcatcgccgtcacgggaagcttctgcagtgcgtcgctgcacctcctccctcctttttcgcccacagactacatataacctgcttttatctaatgatgttggtgctcgacagcgatccagctcatggagaaatggcgcagtgcgattgagaccagggacaagctcgttctgatgattctctcttcggttgctctgggtggttgcggaatttggtgcatgcatttcaccggcatgaacgcacttgagttgacacgagaggacgggtccgtactgacggtggattttgaggctggtttgacgatcctctccttcatctgcgccgttgggggagtgttcgttggcctcaaaatcgcgtctgctgacccattcttcctcgagttggagcaggaaaagcgcaaaaacattctggtatcataagccagtgctttctagttcgtttgaagtctagagtacgctcacatggattgtatcaactttgtggacgtcaggtgaaagatctggcgaccacggccatgtcggacgtcgtgaacaagcagaaagttgccaaacgcatcaagctcatcgccctcttctcgcgtctacccagaattgcaggcgggggcctctttgccgctctcggtgtgctcgtcatgcattacctgggtatgatggctcaaagaacgcaagccagtatgacgctgactgccggagttgtggtggtgtcggtcctcatcgcattcttcaccgccacggctgcgttctggatcctgtttcgagcggtgagtggcctgtagttacccagaactatcgcttagcgctaatttgcggattttgtacgttatcctagctgacattcttccaggacagcgagttgctccgattaggcagcgctctgatcatgggtatcgcagtttgtgggacccactattctggaatgggagctgccagctacacgttcattgaggatgggatggggagtggaggagttaatttcaagggctctcaggccgccatcctggcgtcgcacggttcactgctgttctgctattgggtgatgacatggagtgtggcttcgagtgtgcgcaacatcgcgtccatgacctcaaacctgagcaaggttagcaagcgtgaccccggagccccgcgcaagatcgttgtgggtcaggcaagggccactgaaaacagcgtacgcgcgagtgataacctcacaaaaattagcgcagccgccccctcaagaaccccgtcgtcaggcccccagcaatcggtggccgagatggatcgcaagtcgtcggaaagcgtattcaatgaggtttagcgagctacagattttcacattagcacaataaaatcaagagcatgtacttccgatatatgctagacgctttgaagtgcatttgattcttcaaactacagctagccaacgtatggtcatgggcgtcgctgtctgcgctacccactactgtggaatggggactgcgtcgtacaagcccagcattcaagactacgaggataccacgcgcttcgtcgtagatcggaccgaggttgccgttctggcctcgcatttgtatttgttgcggttatggcgactacgcccgaggcgcgctgcgctgcatcctcgcctacggagaccacgacgaagcgtaggccccgcggtggcatgaacgcacttgagcttacgagagaagacggctgctttctcactattaactttgaggttgggcttaggttctctcgctggtctgcgccgtggggggcgtccttatcgggctcagaatcgcgtcaacagacccattcttccttgaactggaggaggaagcgcgcaaaagcatgctggtacagcgctacgagtggtgtggatgcaagtaaactctcgaggtcatgttcttataactattcttcattctttgtatcgtagctgaggcgtctgtcatcttcgacgatgtcggatgtcgtgaacaagcaaaaagttgtcaaacgcatcaagctcatcgccctattttcacgtctgcccagaattgcaggcgggggcctcttcgccgctctcggtgtgctcgccatgcactacctgggcatgatggcgcaaagaacacaagccgatatgacgctgaccgccggaatagtggtagtctcggccttcatcgcattcttcacagctacggctgcgttctggatcctgttccgagtggtaagtcgcctgcggatctaattcttgcgcattgaatactcactatcaaccataacacgggtaatcttctcctgtatattcgctaccagctgacatttttccaggatagcgtgttacttcgagtggggagcgctgtgatcatgggcatagcagtctgcggaacgcactattcgggtatgggagccgccagctatacatttgctgaggatggagcagatagtggagggttcgtcatcaaggggtctcaggcagctgtagtctcctcacacgtttcgctcctttattgctactgggtgatgtcgtggagcgtggctactacaagtatgcgcggtatcacctatagtgtaagtaagccgctgtcgtcggttagaccaggcgaagcctaagacaaacacggactcgcatcttgagaaatatatgtagaatcctgctcctgtagtgcgttcaaccgactgacagagtacaataaaaacgaaggcaaagccaggggccacgaataacgccaaggacattgatactccttatttggcggctgcagcagttgggcctgacccccattgttgcagcgtgaacggaagtcgacttcggtcgagaaatgagaacacacttcagccaagattttgtttttcttataactgtgttgttttggccatatataaccgaaatatgactaataagaccccacgttcagcgataacacatgccttcggcgatgacatatctcacataatactcgatggtacctaaaaatacaacctacagctgctgtactcgctcctttggagctcatcctctgctcgagatattctccacctttccttgacgaagctgcagtatcaagttggccaaggcggcaatgtccagcaacgaagaagcgatatcccaacattggctggtgccaagagttttcctctcgtacctcattgctgtcaccggaagcttctgtagtgcgagaatgtgtcttggcatccgtcgaatgaaactcacttctaactctttccggttcattcacccgacagcaatccaactcatggagaagtggcgtagcgcgactgataccaaggacaagctcgttctgatgattctctcttcggttgctctgggtggctgtgggatttggtgcatgcatttcatcggcatgaacgcacttgagttgacacgagaggacgggtccgtattgacggtggattttgaggctggtttgacgatcctctccttcatctgcgccgttgggggagtgttcgttggcctcaaaatcgcgtctgctgacccattcttcctcgagttggagcaggaaaagcgcaaaaacattctggtgtgaaccatttgtgaagattctccagatatcctggcccactaacacgggctttatgaacactaggtaaaaggcctcgcgaccacggccgtgtcggacgtcgtgaacaagcagaaagttgccaaacgcatcaagctcatcgccctcttctcgcctctacccagaattgcaggcgggggcctctgccgctctcggtgtgctcgtcatgtactacctgggtatgatggctcaaagaacgcaagccagtatgacgctgactgccggagttgtggtggtgtcggtcctcatcgcattcttcaccgccacggctgcgttctggatcctgtttcgagcggtgagtggcctgtagttacccagaactatcgcttagcgctaatttgcggattttgtacgttatcctagctgacattcttccaggacagcgagttgcttcgactgggcagcgctctgatcatgggtatcgcagtttgtgggacccactattctggaatgggagctgccagctacacgttcattgaggacggaatgggaagtggagggttcatcataaagggggctcatgctgctgtattctcctcgcatatctcgcttttatattgctattgggtgatgtcgtggagcgtagctacaagtctgcgcggcgccgcctaccgcacgcatagtgcaactaagcagacgtagtcggttaggccattaacttaatggacagtagggggggggggcaatgacaactcttcaccaaagcaacgtcgaccaattttttttttcacaccaacgcagaggttggagcagaacggacgaaaccctgtaagctggaacacctagcgtcctgcaagcgtccgcaagatcgcacaaaagagatcatggtggcggcctggtcataccgcagacagctttcgcttcttgcttgcactcgtacatgtgacacttggggcaacttcaatgacgccgaatctgatttcaccgcctacacttctgaagcaacaaagacgcgcccccgctcaccaagcagcaactacaaatgtagcaataacatggaggcaatactgtacactgcgggtggtcatggaggcctgtcgaagggcgttgccctaaactgggagactgaagcaagtagctgggattgttcccttgacaggaggggggccatcgttgctgcgtggacggaggccacgtggcgactgacgtccagcgagaaacgagcacgcgttcaactgcaactcgtgcatagacctttagtcgagtgagtattcacagccccgccagccgcattaacctcccgtgtctatgcgggcagccaggaatccatgggtgttcggtggcccggctgaaagtggcgacgtcggcccctgtgccaagttggcacaggggccgggcactgccaaggcgtcggtagtagctcgcaaagaagccgccgaactcgaagcggaaggcagccaactgttgagcatccagtgcaaccagcctgcaactcgacctcggcgtttctttgcctctacaagagcagagagccatggcggcatcaacgcgatgatggcgcctggccgcagaatcggtccaccgccaagctatcgccgcgccgtcagcgttgtctcataggcgtcggagttggcggcagcagttaattcagggctcagtgcttgctttgcctattgacaccatggcggctcgacccatttgaacgtcgatcggtctcgacaagaaaagaaaaatcgtgcgcgctgcataaaccacgaaaactgaagttgaatcagcaatctgcctccggtcggcgtaagcggagggacacccagacattttgatgcggttcatgggcccccttgcgctgcgtctcacagagactctccaaatccctgcagtctggccgttaaatgggcagagcattcatcgcgcggtatgtatcgcagatggcaagcgctgaacaaggcttgttggcgtgcttgttgaacaagcacaccaacttgagcttcagagagccaccgccttcggcccaaagacgacgtggccctcgccaacaatacggcgacggacgttagccccgagctcaaagatcgttgagtccctcattcccaaatcgacgttcaagagctcaagtagctgaacaccacaaccctcccccactccagcaccatggccgctaccgacctcatcatgtccggcgactgcggcggcaccaacacgcgtctgtcgctgtggaacatccccaaggaggccaagcacatcaagggcgacatcgcccccggccaaatggtcttctccaagaagtacctgaacgaggagtacgcgagctttgccgaggtgtgccacctcttcctgaacgaggccaagctcgtgaacgaggtgcctgcggcctgcgttcttgcgtgcgctggccccattcttaagaacacggtggacttcaccaacgtcgagttcggctggaagatcgacggcccgggtctggagaaggagctcggcatcaagaaggtccgtttgatcaacgacttcgccggtatgggctacggcctgctcaccctgcgcccgcacgagtacattgtgctgaacgacgcccccaaggacgagaccgctcccatggccactatcggcgccggcactggactcggcgagtgtttcttgacccctggtaccgatggccagtactcgtgcttcgcctgcgagggcggccacaccgacttcgcccccgccgacgagatcgagatcgagttgtacaacgaaatcaaggagaagctcggctgcggccagcgtttctccgtggagcgtattatttcgggccccggcctggccaccatctacgagttcctggccaagaagttccccgagaaggtggaccccaaggtgcacgaggagttcctcaaggccaacacgcagcagggcaaggtgatcggcgagaacgccaagacgaacgagctgtgcaaccagacgctggagatcttcgtgggcgcgtacggccgcgaggctggcaacgcgatgctgaagtacctgccgcgcggtggtttctacatcacgggcggcctggcaccgaagaacctggactacttcacgaagaaggacattttcctgaactcgatgttcgacaagggccgtgtgagtcccgccatccgtgcttgcccggtgtaccttgttttgaacgaggacttgggcgagcgtggcgcgcactactacgcataccagctcctgcgtgagatggagtaagcttgtgcgacaatcctcgttgctagtggtcgcgctcgtgtagcattgaggtggacgactgtccaaagaagcgttcgagcatgtttgataataaacctctattgtgtcctgtccgttggtttgtacactccgtcgagtttcactgatcaactatagctgatccagggactcaatcgagaccgtgttaacagcgcgatcggaattctgtctgtcggatgggtacattccgttgttgaagcgggccatcactgggcccgctctaccaggatctgcaaagaagtcgcgggtgcagcagattcatggccgagctgcaacttgagcaggaccaactgcaactgtcctcggcgggcctcaagctccacgtttttgcctccgcatatttgcgtcgctcggccaatggggcgagcacagaagtttattttcttaatgaaggccaagactggttaggactcttgcatgctcagggcacttcccctaccgacttgcttgtgccaggcgatcgcagttctccacatctttctcaagattctatcttgggaaaggtgtttttttacaccgtctctgatagaaacgatagaaacgacttgttacagtactctttaattcagtacatatattatatactagggctacgcgtaggccgggatagcaattttatgggagcaaccagggtttccaagtaatagtatgctctgtctggagatgtttctggtgcacctgcagacgaatacatgaatacatttccaaagtgagatcaaggcgttgtaggagcccggtgttagagtggtcagtatggacttatcccgaagaagctttgaaatttaagatttctaaaaggctggccctacagcccatgtttcggaatagggttagggataaatgcatactaaaaccaagtaagatctccaaacatgtaaaacatgctgaaatcatggacatccatgtttcggttttcaggacgggtgtcatggcacccaaatctattgcaaatcccggtaatcgagttgctaaacgtggctctacctgtccttaaaacctttagaaggccggcccagcgctaggcagggaactgtagacctaagccttgcttcggggctacgtttgcgggttgttcatgcttctcaaacgccactgatgccgatttggtctctgcatcacgatagatttgcgggccatttcaccccctccaatccgaaaacatgggctgtacattttccgtttctaaaacaaatctgatttggcctcatgcatttagggctacataaatagagtatgtattctctgcggtcacactttcgatcttgtagctagctacttttgtacggtacaaaagttcataccagcccgagtttagctggtatcgggcgggtatcgcggccttctgacgaagctgatatcagcgatactgatactaatatcaatatcatatcaatataatgatacatatattgataaaaatggtacctgcagtaatttggctaatgtcgccgtctcctattcttttgcagcacttccttgtactcggaccaattagccttcatcaagctcatcgtctccgcccggtcgttatcaagctgggttcgcaactcgttctccgcatagccactaagactgaaacatcgctcttgacacacggtagatagtggtttggcgagacagattctcaagcttattttcacccgaaaagggatgatccttatgagctctgagcatgtgcttcctggggttagcagtcgtctgttgtcgcattaagcatgatctccgtccataagaggtcgggtctgtgctttttgtgtgtgctacgcacacgagacagatgtgggtgaacaagctgcttttcttctttgtgtcaggaatcggagtaaggggattggccagtttagttgagcaagctgaattttttactttgaaaagtattttcttgaaaactactaatcttttggagataaaacgtgtacacaatgaaagccctggatttgctctaacatgtgcaccaatccagacacagcagctatgaaagtgctattgtagcgcgcaaaagaaaacatgcctacagtatgctgcgatcagtttagtagagcggaataatactggtctttgtatcgaactaccatatggaaacgcgtggtaagagttttatagccaaccaaagcacgtatttcattatttctgcaatattactggttctactaaactggtcagttctactaaactggccaaaacccttagcaagtacatggatgaactcccagacaagaacaagcatgttctggtttgagtgacgcacagatagtggaataccaactcgactccaacttcgccttctttatctctacggccacgatcactgggcgacgtatcctcgtcggccattctctagagagcgcgcacgcaaccgaaccgagatggtagtagtagacttgtacttgccgtggttttgttgggagaagtggctatatgcaagtaactatgtgcggtagcgcacatggaaataacctggttagtgaaatctacactaggtcgcaggatatcgatatttatatgccgaagtatcattggatctcgatacagcaccaccaccaatatcaggtgatactgatacaagtatccggccatacagtatcgatatttattacaggtatcagccttgatatgaacccctgtttgtacctcttagctaaaactcctgttgtcctcataccgctaatgaagaagcgtacagagtgatgtgctggcgtggtcatgaatataaaacacagacacccggggcaaaaggattaggtgcatacatacatggatgtatgaagctgcaaatacttctcatgttaggttcgttggttatagtttctcttttttgccacctcttccaaacatgctatatctactttttttcgcattttattgggcatatcatgggtaataactctccatgttagttcaggggccgtggagcggtactccggcagttgttgtagctcgcgtgtaagctgaaggcagacagatgggtaagtacgtagggcggttgcttggttttgtggtagcgaaatggcacaatagctgaagtcctgctcaacgatagatgtggtcctacgagtagacgaaagtgagtgactcgggcggcgggtcactaccatgcagaaagacaaatatcgacgcggcttcagtttaccggcctcattctacttgcctcagttaccgaggtccgaattaacccgattttgggctgcctagcagcatgacctatcggccaccgctatcccagtataaatgacttgctacagtactcttgaaattagtaacagtgctctcagaagtgctacagcctgatctggcggtgcctgccgttgtacttcgttgagctggttagataatgattttcatctatccagctcaacgcccacacaaagtacgttgaccctatcgacagattgattcggcattgtccatggttctaaatttctaataataagtggcatttctaagcagtagtcagtcgcagactgactagttgaagttgttcctggatcggaatccagtccaccggtttcgcgtctccgacggtgagtaccactgctgcgcggtccaaagatgagaatcgcttttagccttcacttgaagtgagctatctagccgcgatgtgaaagatttcgtgagcggtcctcattcctgaatcaacgttcaagagcccaagccactcccagtatctagctctccccccctactcaaccatctccacaatggccccgtacgtcgcgcttgtcgttctgcaccttgctgtagccattctaactctgtctcgactgtgaactgtgcaggtggcttggatgctgcagcgatgaatcgacgacgaatgtcgtcgctactccggccgcccctgcggcccctggccacgacctcatcatgtcgggcgactgcggcggcaccaacacgcgcctggccctctggaacatccccaaggggtccaagtacaccaagggcgacatcgctccaggcgagatgctgttcgccaagaagtacctgaacgagcagtacgcgagcttcaacgaggtgtgccacctcttcatgaacgaggccaagctcacggaccacgtgcccgaggcctgcgtgctggcctgcgccggccccatcatgaacaacaccgttgacttcaccaacgtcgagttcggctggaagatcgacggcgccagcctcgagaaggagctgggcatcaagaaggtcaagctcattaacgacttcgccgctatgggctacggcctgctcaccctccgcccgcacgagtacattgtgctcaacgacgcccccaaggacgagaccgcccccgtggccactatcggcgctggtaccggtctgggtgagtgcttcctgacccccggcaacgacggccagtattcgtgctttgcctgtgagggtggccacaccgactttgcccccgccgacgagatcgagattgagctgtacaacgacatcaaggccaagcttggctgcagcaagcgtttctcggttgagcgtattgtttcgggccccggcctggccaccatctacgagttcctggccaagaagttccccgagaaagtggaccccaaggtgcacgaggagttcctcaaggccaacacacagcagggcaaggtgattggcgagaacgccaagacgaacgagctgtgcaaccagacgctggagatcttcgtgggcgcgtacggccgcgaggctggcaacgcgatgctgaagtacctgccgcgcggtggtttctacatcacgggcggcctggcgccgaagaacctggactacttcacgaagaaggacattttcctgacctcgatgttcgacaagggccgtgtgagtcccgccatccgtgcttgcccggtgtacctcgtcctgacggaggagcttggtgagcgtggtgcacacttctacgcgtatcagctgcttcaccagtaacacggcaacgttgatgcctcgttggtcccggtgctgtcatcgtaggcaagctggccaccgaggctgaggtgtcttcagttgtagcgaggcagggtgatagttaaatgttgataataacttcttattcgatcgattggtacgtgtagccgtgctgaagcagcaacggcaattgcattttggtgtgaacatcgtttggtttcaaggtctcaagttaatggtgtacggcagtactacccccaggtgaagtcgagggacatccaatgtatgtcatacatgaaacatcgtttctatgccgatgctgccaccgccgtgcgcagctgcatcaatccactcggagacttcgaatcggaatgcgttgagggtctcgttccagagcaatccaaagcgatgatgacttcaaaagtcatcaaacacggagcgacgtttctatatcatttctaaaccaagcagcacttattttttaatttttttttattttggcatagccccccttataatgaaatgtgcataaagactttttaccctttttacaggtactttttactccaatttaagcccctgtattacaattgagaatggggtagggcaaatgaactatcatagcctgcccgggcgatttcgatcgaattttacctatttttaagaacacacgaactcatgttgaacggcgcccaaacgcgacccttcaaatgttaccttgttcgaaggtataacaagttattaaactgaggtcaactttttatcgaaccggagatcgccccgtttgtatcagcaaacaaacgattgcgttaatcgttgaggtttaaggaaagagttgacgaccgacgatttatacatggaccgtggaacccttttcaaggggtaggcaaatgacagtggagcccgccgtaaaaaacatatgagaggtcaggcacctccgtaaaaagtctccgctaacgtacgaaacaatgtactgaagagtcgtttggattaagttattcatagataacctaattcaaggaatcggtcagtacactgatagatccttacgaagattggcatgatacagaaagcggtgactaggccagacgtgccatatagtggagacaatagccaggatgtatgctctgtagctgtgaagaaaacgtggagaattctctttttgccctgacatttggtatattattttgagaaccttgataaatagacgaagtattgtcatttgcgcaggaagtaagacgtcgttgctctccaaaatcgcatgctatttcctgagcaatttaaagtagcaatgtgcaattctgacatcaacttttggtcttgcatgttaacacaaacgccaaatgtatagctaacactagattttgttaaatgcttgttactgtgtagtgaatctggcgaacatatatgtggagtgagacgtgtagtcgttcatcttgaagctcttttaaatcacttacagtgagttcgtgttattgtgaaaagcacttacgtgttggggggcacactgctggtctcactgtttcaatgagctttaaattaatgtaatgtaagagcaaatttgcataccggtggttgttgaatgtaatgtgactgaatttttcgccatgagttacaattttactgatatattggcttgctgaatgctcgagcacgatttagcctggttctgtgggggatatttaacgatgtccaccaggaaatttgttgcaatcgattcagcggccaacggtggcaacgccaaagccacttataatgattcgaaaagtgtttatttactactgtagcatggaaatcaggacgaagcaaaagactatacattgatttacggttgaaagatcgaaagctacgacggcactaccagatgcggcatgagatcccttgctgtcacgtcaagcctctttcctgtcttcatttatggcggcgacggatgactcggacatgcaagttccagttgatcagcatgtgtgcaacgtcgggaacacgcgcgctgctaccattgctcgctgcgctcgctcgtggcatcggtccccgtgctgcctataccgttttccatattaaactccaagcccggtcattttaataaaatctgatgcaaacccggcacttcgtgcatctatttttgaaaccaatttggtaaaagtatgaggatacttgggggcggtgctgagaagctaagatacaacattttccgaagcaatgcccctctagcaaccggggcgaaaattcgccgtgaggatgctgctatactagtacttaaaagcataaaaatactgttttcagaatggtgcttggtttaccgaattccggtgcggcagcgacaccgaaattgcagcttacacttccacacactacagtatacacacactgtatgaaacacgaacgaacatcaatgtttattacttcgcattaggcacaagcgccagacaaactgatagggcgctaggctacaacaagtctactgcatctccttcaacagttgatacgcgtagtagtgagcgccacgctcacccaagtcctcgttcaaaacaaggtacaccgggcaagcacggatggcgggactcacacggcccttgtcgaacatcgagttcaggaaaatgtccttcttcgtgaagtagtccacgccaggccgcccgtgatgtagaaaccaccgcgtggcaggtacttcagcatcgcgttgccagcctcgcggccgtacgcgcccacgaagatctccagcgtctggttgcacagctcgttcgtctcggcgttctcgccgatcaccttgccctgctgtgtgttggccttgaggaactcctcgtgcaccttggggtccactttctcggggaacttcttggccaggaactcgtagatggtggccaggccggggcccgaaacaatacgctcaaccgagaaacgcttgctgcagccaagcttggccttgatgtcgttgtacagctcaatctcgatctcgtcggcgggggcaaagtcggtgtggccaccctcacaggcaaagcacgaatactggccgtcgttgccgggggtcaggaagcactcacccagaccggtaccagcgccgatagtggccacgggggcggtctcgtccttgggggcgtcgttgagcacaatgtactcgtgcgggcggagggtgagcaggccgtagcccatagcggcgaagtcgttaatgagcttgaccttcttgatgcccagctccttctcgaggctggcgccgtcgatcttccagccgaactcgacgttggtgaagtcaacggtgttgttcatgatggggccggcgcaggccagcacgcaggcctcgggcacgtggtccgtgagcttggcctcgttcatgaagaggtggcacacctcgttgaagctcgcgtactgctcgttcaggtacttcttggcgaacagcatctcgcctggagcgatgtcgcccttggtgtacttggaccccttggggatgttccagagggccaggcgcgtgttggtgccgccgcagtcgccggacatgatgaggtcggtagcggccatggtgctggagtggggggagggggggggtgttgctgttcagctacttgaactcttgaacggtaaattggaaatgagaacgctctgctcggctcgtgcgtggacgccatgattaccaggggggtgtacatggcatagtgcccttgggggcctcgggccagcgtgcaagcaaggcgtggaagctcaagttgacatgcttgatactagccgtcagtaggcaacagtgcgcgtgaacatgcagctgtagttgcttcgatcacggtattgcttactggcgcaaggtgaagcagtagtgctatcgtactaacgatacttgaactggcagaccgcgacagcatcgagaagagttttgaactcggaacgagttaaatctaaatgagttatttaaatattaaaatataatattaccaatgaataaataaaaacaagggaaaatattaacaaatatgccagtcatagatgcccccatttactaaaatggtaattctcggtgtgccaaaatttgtagcaaggtcttcgtgaagtgcaaaacgtaatttatcaaatctctaaacaaatctgaaactagcagcgtgtaaacttaaataataatattgaggtaacatttgctaaataaattgacttcagcttatacatgtattagggggtttcaaagtagcgattttttggacagatcttttgcaaaggatttgaaaaagatcagaccaaaaatcagacgaacgatgagcctccggagagccagggttcccagctacccgggttttccaagcgaggtgggtgggttggagcacctcatggggtggatgggttatgggttttagtttacctagccccatatggacgttctacaacaccaaacccgtgatatccgatctcaaaacctctaacttataatttacggcacaatttgatcgtatatatatcactgttatatgcgtttttaggaataacccataacccaagaattcggaggccggggtgggtgggtgggtaaccccggggttacccaacccacaattaccccactgggaaccctgcatagagcggcaccaagacgccgcttgaagccgacgcagagcagcacctagaaggcggccgggcgccacgcgcacaccaacatgacgccaaagacgccgggttggcgggcggtgccttggtcagctgctagctgctgctcggttcacgagcggaggcttcaagtgttgctccggttgcgagcgttggcctccagcttggaggaccaagagcaaatccttaggtcatagcaaaaccgaacaacagcacgctgcgatggtcaaaagatcagacccatcctttgcaaaagatctgtccaaaaaatcgctactttgaaaccccctattatggttgagggtccctcattgttttacgtaagtatacttaaatgagggccaatgtgaatacttatgtctctaaaataaaaattctaaacgcttaaagcatgtactgtattcaggcctgcaaactgcagatactaatacacgtacccgggggcaaaactggcatggagcagtgaagtctaaatccaaaggctatactatgctaccgctaactattacgaaccactcatgcggaagcaagaagacagcactaaaattagttggcatattagttgctgcaatcgttaactgaagaaaatctataaatcgcttgctacacacagttctgcagcagcgggggcaaccgagtcataccggcgaagtcgttgatcaaacggaccttcttgatgccgagctccttctccagacccgggccgtcgatcttccagccgaactcgacgttggtgaagtccaccgtgttcttaagaatggggccagcgcacgccagcacacacgcagtgggcacttcatccacgagcttggcctcgttcaagaagaggtgacacacctcggcaaagctcgcgtagttcccgttcaggtacttcttggagaagaccatgtcaccgggagcgatgtcgcccttgatgtgcttggcctccttggggatgttccatagcgacagacgcctgttggtgccgccgcagtcgccggacatgatgaggtcggtagcggccatggtgctggagtgggggggggggaggggtgtgtgttgctgttcagctacttgaactcttgaacggtaaattggaaatgagaacgctctgctcggctcgtgcgtggacgccatgattgccaggggggtgtacatggcatagtgcccttgggggcctcgggccagcgtgcaagcaaggcgtggaagctcaagttgacatgcttgatactagccgtcagtaggcaacagtgcgcgtgtacttgcaacaatttcgtgacgttaggggtgagatgtagctgatagaggggaattcaaggtcgggccggttaagggcaacttcaatacttgtatgtgcagattgttctgcgacaccaattgcttccgaaaagagccttatggcccgctcacagctctgtatttaattgctcgccaaagacaatgtcatgtccttattttgatttggcttctattgtgctttgattttggcaatatgaggcgagatttgctgtatttatagcgaccacctgctagatttacggaatggcgttacagcaaccatatgacgacgaaacgacagaaattaaagcaaccacaaggcctaaagcaaccctaaaaccagctggcgcccggtaatttattttaaatgacgcgtaaatgacagggacacgtcgccctcgtcatggtcttgctacatatatatctaaatttagacacgtcgtggtggcgtctaactgatgttctctacacagcaatacgtgaaacacatgacaatatgtgtcccacattttcaacacttagcagattttgagcgacagcaaaaatggagaagaaatcgctggcacatgagctggtgcgcgcgagaatcgccgagattgcactcctcaagaagaagctggatgagcttaccgagcatctggaaaagcttctggcagcgcagctacaaatccaagccctcgtcgaagatcgcgaagagaacagctatgcgttagcagccgtcttgggcgatgaaggggccgaccaaggtggtctcaccgcagaggacgccgctgtttccctcgatgttctactggagctggcggtgcgaaaaatgaaagactaatgcagcatagactctgtatttaaaggtaaatacagactgtggtgtttctcagagctggttctgtagctgctgatgaatctggctagctttagcgacgtcgcgttcagagagatgacgttcttgggagtaacacatgatgacccacagcattttcaatcgcatcaccttgacgtcgttcttggaaattctagaaagttgcatctgcaagttccccgtaagatagctgtgggcttgggctactaccattacaccacagctagcaaatcaggttgttgaggggcacagatccactcaatcggatcgaagaaaagatggccacgggggtcagaagccttgtgccaccgctccacataaccacgaagcccctcctttccttcattttctttgtctttcggaattccagtccacacgatttccatttcatggtgatagtcatcatcaatgagcgggtcgtacatgtaaacatgcacccgaagcttgcttgtttttgccgtgtagtggtctgcgtgcagattaacggggtggataataaaattcgttgctgcaagtgctgtcttagggagacttggccatccgatagcccatgtcagtgatgacagcacatggcacttccccaccgatctcgcaagggtctccaagcaaaagtccacagggctatcatttagccatccacgacagatccctcccacgatgttgtcaaagctgatcaggactttgttggagagcgtcacaaattcagtgcgtagccgacttgaagtacactttgagataatttcgttcgctagaccttggtgccgctcgggaacagcatcacgcggtagtcctgcagttgctgtctccgcagcgaaaagatccacgatggagtcaactttacgccaatcttgctccagccactttcggtccttcaaccatgaggtacacttcgccttgatcgcgtagaatcctgttagagcaccaacatattgtctagaaaaataaacatgttaaagcaaccctattaaaacaaccatatcgctaaagcaaccatatcgctaaagcaatcatacccgctaaatttccacagttttggatcaatcgccaagacgacgtcgagaacaagtccttgcttcttggccttttcatccagtacaattggctgcttctccttccgggtagtagtcgttgctgcctgcattgatagggcgaggtcttgtggaattacaaatgtgtgcatgtagtccgcaggtcgtacaatttcccaatgacaatcaatcttccgagctcttagataggcatcgtccagctgaacaggatacttcgacagcatctccgtcacgcgcttcagatttgaggtgtttctggcccaaatcaggaactgatccaagtcacggcaagttcagtggggtacttgtgaatagcaagacggtcggctttgagactgatcgtagtttgcctcagctgtttcggagttgaccttgactttccttggcttggtggattagaaactctaacgacatcgacctggcgcacgcgcgactctgtgtcaggcttcgtagagcttgaaaccttgtcacagctactcattccgcagctgtcatgagatttctcgtcgatgggaggtcgaattggagatgactgcgaaaggtgagtgcgttgtgtcggtaacatactttcgtcggactcgtaatcgccataattcatggtcatggggctgctttccaatgcgtccatgagcgtcatagtcaccattgcctccacggggtccagaatggagtctgagacaggttcagatacatcttcttcttgcttgctatcttcagcagattctgtagaactcggttggggggcagggttgacacggttgagccctatgtcgatcgtttccttccaggcacttaggtcttggtagaagtctgcactagacaaactgacaggtgttccaatagcggttccagcatcgcttttgcgtatgcgtatttttcagctgaagacaacacaacctggtttgctcgttcacctcggcgtagccgtacgtacgcaacttgcttcctagctttggttggcgaagcgttaccccccgcagcataaagtggttgttctggttcagccccagtgtcgttcggcaactttactttcggcaaccttaacttggacatctgcacaattggctgtaacatttccgctgcagccgtcaattcgtttttcacttccaaggtctggtacgttctccaccgatcatgaattgccatagctggaagcagtttgaagccatgcccctcgcgtgctaagtgcataagatgacgacatggtaaatggtgactgctataaaatagacaagtacacgtccactccacatcgtgacagcgaaaggtttgattcccgcaataaaattttccattgtgaaggactcgacgctgtacgctcacaagtcgcatctgccatgaagttcacaaatcgttcccactcttttctcactttctcgaaggtgtcagggtacagtcgagttgctaccgtccggagaaacatcggtatggttttaggaacgggcgaagtcgaatggtgctgcgcgatgacgaatccgatctgctgagttatcatgatttgatgctgcaccaagcccgcaatagtcttgtcaattcgtgtcttgtgccccaacagtattttcacttgattccagtttgaatcgatcctgttcgttgtagtatccccagccgtgaaaactttgctgcgaacaaagttcgcccacatgtctcgacacgagtcccagttcttttcaaagtacgagaataaagcttgtttcttgttgtcttcgcagtattgctttaatgcaccgtaactagaatcgtaacctgtctctgtggagctgcatatggtttgttttccaaagttagcgttaccacaagaatcataaatagaacctgttgcgtacctgtacagcgtttttatcatcaggttgagtaactcgtcgcgttcagatatcttaagcttgtacgggcccgctgcatcaccttcttccagtacgaaatggcatggaattgacaaagtaaaactttcgcagcaggaaatagtgttttcagcacgctccactcaacgaaatctttgtcgatcacgatggaggatatcatccgccaacttgggttcttctcttggaaatactccaggattgttgtcatcatcggagctcgttggttgaggcatatgaagtctacaactgggaaccctctaccagtagcggttgtgtcgaccagactccctgaaatattcaacacacaacagtagaaaatcactttgttaataaggttgctatatcatcgatatggttgctataactacgcaaggtttccgtaacaaagataaagttgctataccgaacaactcatacgcacccaagtgatagcccaaattgttcgtgccgtgagtgaaatccatcgtaagagtgtcgccccagcgctcgaacatcaacttctgcacctttgtttgcatcacgataccgcatgtcacgtccatttggtcttgaataacaaggacgtcactaccgtctaactggcggatagcttgcagcatgtctttcaaacgggccttcgctgcgtcgtgccccataatactgcggatcagattacgggtctgttgaggtgttattttgcagcctagcaaacgcacaaagcgcgaacagtaacgtaagtgtcacttcagcatattatatataaaactacgcaccgattctctcattcaggaagttcgtgatgtgcttggaagaaacactagcatccgttaaagtcttaacatcttcgagatcttgctcgtccaacggaagtgtctttgttgtcaggtacaacgatgcttacgttcgggtggtcgggtgcgtgtgggtaaagttctgattatcaacagcgacatgtgagaaatactaacaaagcaagcaaatacacgaaaaggcagatacctcgtttcttatgacaattcgaaatttgccattttccatccgctgaacggttggtgtcatgcgtgcaggacacccgcaatagttgcattttctattgcgatgtcccttggagcgcgacgcttgcgaaacaccgtgtgtacagcggaggaccttgtgactccaattaaacgtgaagggatttggtcccgatgattgctgcatatgaaagggggtttcgttaataacttaaatttctcatcaaacagaggtcatcacacatacctgttgtactgatttcgtgtctccgagcttcgtactagaaacttggggtggtgcttctgctcgtatattttcaagtgtgcgttgaacttgctccaactcttgataatcgctggggtaaagggcggaacggggttgataatttcttcgcgctcctcgttgacctcccgcaactcgtcaaggtgcttgcttgatcgcttccgcggtatgtactgcttgttccgcttggataaacgtggggccgaatcagcgtcgacagactcgtcaagctgcagctccgccttccgctttttcgcgaaagattgggcttcatccccagcagaaagcttgcatttggccagagcggtatctatcgattccaaagtgaatgtcaatattaatgatagcgcaacctttttgcttaaagcaactttaacgagaatgcctggtgttttcttgcgtgctgtggctttctttctcagctcggggctctgtttgcgtgtcctgcgttctaaacaaattaaaaaaatacacaatacattatcagttcaactcaataagtatcaacaataatccaaacgagtcttacccgcttctgcttcgtcttctgtgctggattctccgtcgtcgtctgcctcctgttcatcgtcactcgcctcctcttcatcgtcgtcaccctcctcttcatcgctatcgctctcctcatcatcatcgacctcttcttcgtcttcctcctcttggtagcaatcctccgtctcttcgtcgcagttgtcttcctcatcctcctcatccagaacaaagtcttcgtcttcgtcgtcgtctttttcaatcccgagagcggcgtacatatagtttagctcctcgtttacgttccgcagctttcggtctaaacaatacataccgacataattcaaacaaaatgtgaggcacgtagatactttcgttgccaccaacatggagcatactgattaccgtttataatggctccccccgcaggagccatcggtcccccctcgccgtttggtgcttgactgattcgcgagaggtgcgtgccccacgtggcctccgttcagcagcgcgattcttaaaatgagcggctgtgaggtggcgcacttaatggcatcgtacctaatcagaagcgcactttagcgtggtttgcgtacctaagggcttaatggtaatttagacatttaaattacgctcgtaatttttgaaatccctaaaagcaaccatacatgtctcacaatggctaaaagcaaccatacttatggttgctctaaccactcccagatttacgataaatcgaggtgcataaatgggtggaggcctagaattacgcttttagtgtaattctaggcctccacccatttagcgccacaattgcacttttgaaagtgcaattgtggctgtgcagctgcaattctgtcggtttttatccacaagcacctacacacacggcaattatgcataagagggtggatgtgctggggatcatggacgatggtgtactgggccaatgcatggctgctgacaggccctcccaagccgatatatatatgaggagatggatttatgcataattttagcaggtcgtgcatcttctttcacacatatttaggagcaggctttgccatatttagcgtctaaaatggtcggcaaaatagctgcaaagcacaatacttgaagtataataataataataataataataataataatttaataggctcactctttcgctgcacgtgttgaaactaattgcgtgatcacggcagagctatctactgaataattacgtatcattcgaagagtttccaatataataggctgtttacggtcaatttttattggtatcgatatatggacagtgattcctaataatatgtggtgataataaatcccctcataataatgtatttggaatcaggtagctccatatagcggaaatgcccgagtactgtccggtattctatttattagaagcgggccaaatttgtgcaattacgaaagcggtcttttatttgggtagtgtcacttcctcagacaaaacgatgacacctaccaatgagagcatcgggtctatttctcgagcaaaatgataacttcgtacagagtatcatcgattgtccgcttacgtgagcggttgtcgaataccgtacctccccctactcttttcatccattagcggtagaatgttggaccatctcaatgcctacaggtcttgtaatcggttagggcttctaattttggaccgctttcaaaaatgaccagagggcttttattcgggacaggtgctgtattcgggaatatccgttaatatggagctttacactaatttcgtggagccgtactagacagcatggatttcttaaatcagttagctgccactaatcgactacagagtattatacctccgctaagttgaagcttgtcatattggttcttttctttaataaaaccaaggttgaggtgcattgtgttactgacgtcttgcaacagtggcgtatttttcaaatatttagagaaatctatgagcatgttcatatttatagcttaaattccttggccttggactacaatgcacttttaaaaaatagctatttcgcaccttgagttgtcccataagccgtctcgtagccatcccgtaagccgtgtaccccacgattgcaaaatacattcgatgcgttacatgggctaccagggagtaggtgaatgaagtgtaaagtgtgtacaagcgtttttgattatcagatttttgcatggatatggtcgatgacttggtttgatattctatctccgtcccaccgagtaacagaaagtaggcatacgaaagccccctcccccccccccctccctccccttatttgccttcgcagattgaggtgaatgcatcagcgttgtgcctgcgaaacacatgactactgtagtatctgcaactggattgaggacaaaggttgttgttttgttcgagcagacagcgcgaagtggaggttccatttctaagcaatgtaaatattattttttaaagatgtagaaattcaattttcatatttgactttcttagagactaaaaattggtaattgattaccactgtcaatgtctaaatattagaaatattgatttcgtcggactttaaaaagtccgacgaaattaatatgtttttttaaaatagaagtaaaaaagttcataataaaattttattatgaacttttagattcgtctttttttacttttaatataatataaaatgaatttctatcgtttagaaacagtcacaggatttcgtttgggcagccgggcttaggtcgaattcatacatgtacacttacacgagcactgcactccaccttgttcgtgcctaagattcacagcctgcaatgcgtgtattgtagcaatacggggcagtgaagtcaagccacgcattcgccgaaatgatccagtcagtccatacatacatgtacttacccgctcaacttgcgtcgcatttgccgcggatttgtgcggatgctgaccgcaccccaacttcaattcccatcgtactacacacacgcgccaaagctgacggcggccgccacgtacccacaccacgggcccataagcatggccgccatgaagcgctgacgctgttgaagcgaccgggtcaccaccgtgtgcactggccaagctgaattcattttcaaatcaacctccgagggctcaagtcgatcacttccccgctgcacttcatcgatcaagcaccatggctgccaccaacctcatcatgtccggcgactgcggcggcaccaacacgcgtctgtcgctatggaacatccccaaggaggccaagcacgtcaagggcgacatcgctcccggtgacatggtcttctccaagaagtacctgaacgaggagtacgcgagctttgccgaggtgtgccacctcttcctgaacgaggccaagctcgtgaaccagatcccggaggcctgcgttcttgcctgtgctggtcccattctcaagaacacggtggacttcaccaacgtcgagttcggctggaggatcgacggcccgggtctggagaaggagctgggcatcaagaaggtcaagctcattaacgacttcgccgctatgggctacggcctgctcaccctccgcccgcacgagtacattgtgctcaacgacgcccccaaggacgagaccgcccccatggccaccatcggcgctggcaccggtctgggtgagtgcttcctgacccccggcaacgacggccagtattcgtgctttgcctgtgagggtggccacaccgactttgcccccgccgacgagatcgagattgagctgtacaacgacatcaaggccaagcttggctgcagcaagcgtttctcggttgagcgcatcatttcgggccccggcctggccaccatctacgagttcctggccaagaagttccccgagaaagtggaccccaaggtgcacgaggagttcctcaaggccaacacgcagcagggcaaggtgatcggcgagaacgccaagacgaacgagctgtgcaaccagacgctggagatcttcgtgggcgcgtacggccgcgaggctggcaacgcgatgctgaagtacctgccacgcggtggtttctacatcacgggcggcctggcgccgaagaacctggactacttcacgaagaaggacattttcctgaactcgatgttcgacaagggccgtgtgagtccagccatccgcgcttgccccgtgtacctcgtcctgaacgaggacttgggcgagcgtggtgcccactactacgcctaccagttgctgcaggaggcgtaagccttgtatgaatgcttcggtcttctggccgagctagggcaatgcgaatagcggcccgaatgtgtttgataatgaacctctttcgttgcgtcttgtccgctttggtgttgaattcgagctgcttgatgatgcgtgtcaggtctccgccgcgaggtccgccgagtccatgcaccattgtatcaagtgccgattgctggtgcgcggctggatgtgcactccgcgaaagtcaagtcaagtcgggagtcaaggtcaagggcaacgtgttccggatcaaatcagactcgctcgagcgtcgaggctgcttcgacttgggctcggccccaacttggggcccccaagcagcccgcgaggccgagctatgcactagttgaagtaggcccatactgagaccaagtctcaacgtctgacgtcacgcaatgcggatgcatggccgggagcgaggcctctccatccacagtattacaagcagcaacagctttcgaaagaccatggcccatgtccaagacctgtggcttgcaagtgctccttagacttctactcggcagctccagtattggagactccaatttggagtctcgccccgaaagagctctgggaagccactctgcttggtcgcatggccacgcgcttgcgctccgcaccattcggtgcgatggtgaaagttcagccgacggagcagagaccttgcaacggcccaacaacttcaaggccacagccgggcgacgctgccttgccacgtcggcaaagatcctctgtcctgctcggcccgcgaacgctttggccattccggaatcttccgtctccaggacaagcacctccgccccctccttctaccatggcgtacgtggcctcccccttgcaaccaccgacccctcgtcgttgcccacgtcgagatggacgcgaccgagctttttcgtccgagtaaccatggctggaagtctcacaatcacctgttatgtattgcagtgactacaacctcatcatctcgggcgactgcggcggcaccaacacgcgtctgtcgctgtggaagatcccggccggcgccacccagctcaagggcaacatcgcccctggcgacgccctcttcgccaagaagtacctgaacgaggagcacgcgagcttcaacgaggtgtgccacctcttcatgaacgaggccaagctcacggaccacgtgcccgaggcctgcgtgctagcctgcgccggccccatcatgaacaacaccgttgacttcaccaacgtcgagttcggctggaagatcgacggcgccagcctcgagaaggagctgggcatcaagaaggtcaagctcattaacgacttcgccgctatgggctacggcctgctcaccctccgcccgcacgagtacattgtgctcaacgacgcccccaaggacgagaccgcccccatggccaccatcggcgctggcaccggtctgggtgagtgcttcctgacccccggcaacgacggccagtattcgtgctttgcctgtgagggtggccacaccgactttgcccccgccgacgagatcgagattgagctgtacaacgacatcaaggccaagcttggctgcagcaagcgtttctcggttgagcgcatcatttcgggccccggcctggccaccatctacgagttcctggccaagaagttccccgagaaagtggaccccaaggtgcacgaggagttcctcaaggccaacacgcagcagggcaaggtgatcggcgagaacgccaagacgaacgagctgtgcaaccagacgctggagatcttcgtgggcgcgtacggccgcgaggctggcaacgcgatgctgaagtacctgccgcgcggtggtttctacatcacgggcggcctggcgccgaagaacctggactacttcacgaagaaggacattttcctgaactcgatgttcgacaagggccgtgtgagtcccgccatccgtgcttgccccgtgtacctcgtcctcacggaggagctcggcgagcgtggtgcccactactacgcctaccagctgctgcacacgggtgcttaagctcttgtcgcatcgcgagcaagtgctgctgaggtgtagacgtggctgaggtcgtggacaggaagagaactcttcctgcttccacgtgtggtagcgagtagcgttcagttgtgccatcgagcaacttcatttgtaagaaaccattctttcgtattatcccgctgtgtcgcttgcatttatttgctgggggatgaaggtattggtggtgactcgaaggtttgctgtcgttcgatccacgacgacgatcagcgcggtggcgacgagcgaagagatgattgctggcgagtgcttggagatacagaacagtacacaagcgatggtcgagcttcagcctccaagatcgctcacatgcttatgcacggagtggcgatccacagcgttgggcgatcgcccctgtttgatacatactgtctccgccatggatatcactacagtgcacacacttcatgaaccagaagtcctaatgcaacaactgcgaactggtttcccaaatcaagttgtcaagcagccaaagcagcccaaagtggtgtctgataatggaagccattcctgcgacgtgtaccagcaccgtaacactgttatgttgcgcgacagttgctgcaagcgcgacttggcatccatcacttcaagacgcgcctttcattcccgaatctcccctctcggtcccaagtatctaaacgctcaacactccaagcaactccatcatgtcgtacgtggccacccctctctaaccctctctaaccgtctctaaccggcaaattctttcacttaacctagaggcgacctcatcatctccggagactgcggcggcaccaacacgcgcttgtcgctgtggctcatccccaagggctccgtggccttcaaaggctccgtggcccccggtgagatcacgttcgcgaagaagtaccacaacgagaagtacggtagcttctcggaggtctgccacctcttcatgaaggaggccaagctcgtggacagactgcccgtggcctgcgtgctggcgtgcgccgggcccatcctgaacaacacagtcgagtacggcccggttaacactagcctaaactttagcactagcctaacctttgtgtctctctaactgtttctaaattaggttcaccaatatcaagcaaggctggaagatcgacggcccgggactggagaaggagttgggcatcaccactgtgaagctcatcaatgactttgccgccatgggctatggcctcctcactctgaagccccatgagtacattgtactcaatgaggcggaaaaggaggaaggcgcccccatcgccactatcggcgctggaacgggcctgggcgagtgctacctcacggccgacaaggacggccagtattcgtgcttcgcctgtgaaggtggccacacggacttcgctccggccgacgagatcgagatcgagctgtacaactccatcaaggaggagctgggctgccaccgccgcttctcggtggaacgtattgtgagcgggccggggctggccacgatctaccggttcctggccaagaagttccccgacaaagtgaacaagaaggtgcacgacgccttcctgggcgccaagtccttgcagggaaagatcgtcggcgataatgccaagacggacgagctttgcaaccaggccatggagatcttcatcgagtacgtcatggcccaactggccagcgcgtttttagtgcattgtactaactttttgttttactatctttctttttgttgatagtgcttacggacgtgaggctggatgtgccatgctgaagtatctacctcgtggtggcttctacgtcactggcggactcgcgccgaagaacctggactacttcacccagaaggatattttcctcaaggcgtgcttcaacaagggccgcgtgagtccggcgctcaaggccatccccatctacctggtgctgacggaggatttgggcgaacgcggcgcgcactactacgcgtaccagcttctggagtcgtacaaccacagcttgctgggcgacaccatcgcgcgcgaacgcgtgcaggagaaattcgccacgagcgaccacttggtgctctactcgaccattgctgctgcgggcgtggctgctggtatcgtcctgggaaacttgctgcgaaagtaaaagcgcacgtgtcagcaaagcgaccggttgatcgatggttatcatcatcctcgtgtttgagcaaggtcacacaactggtacctgaaccgaccgatcgctgtgtacaagctgcagaaaatgaaaaattacgcgactaattcagttctgaagttgaaatgttcgcgtgttgcagactttttgtctagttgtcgcgctggttgtttggaggttctggctcaagaaagagtccgtgctcctttaggagatcgaagacctcaggtccttccagcattcgtcggttctcgacagcctccctcatcgctcgcttgaacgcccgtacctggcttttgagcccagccagctcttcatccagcgaggcgtggagcttcttgcgctgttcgagctcccgatgcgtcgcgtaaacgttttccgtcacgccgtacagcttgcgccgaactgcgtactggttgccaatgatctcgtcggcgttggcccaaactgcggtgcactcacgcttcaacttgcgcacagcccgttcttccattgtcctgtgggattcccagttgtccttcaatttggtgaggatctccttctctcgcggtagtttcgctctacggtagagctcgtccatggggttccgtcgggcctccagcctccccagcagcgatttatcgtactgctctttggctttcagcgctgcaacagctctgctgatctcgtagattttccgagcttggcgtgtccgataaatccgctgcagcacggaagcagcactcgatttggcctggaaaatctgggagaatcgctttcggccaagacggccacgataaatccgctggataatctgggcggattgaagacagcgctgccgatgccgctcagccttgaagtacactcggccacgatgacctcgaaagactcgctggatatccacagcggcgtgggtcttggcttctcgcttgcgactcagtcgcagcttgttgatccactgcttcatgtactgttgaatccgttgtgcagcgagaaatctccgccatcggcggattttcagcgccttccgacgcgcaaacacggctcgaatccattgctggatgcagagcacagcgcctttgtggataaactgctgtcgaagcagagcttgcgtcgcgttctggcctttgcgagcgtatttggcactgcggattttccggaagagcagagctcgctttcgacccaacataccacgatagcacctctggatatctcgtgcagcttcgttatggtgcttggacacagcttggcgaacgattacacgcatttgcgtcactatccgagcgtatcggaccatcctctgcatttgaattattaatccacgctgatacagatagatttttcgtgcacaatagcgtcgccactgcgactggatcacgatagcagtattggtggctagcgtgcggtagaatgcaacgcgtttgcgggccatgtgacctcgatacacgctctggaatgtgagcgccgccgcgttcatctcaatccgcatagcagacacgtgaagtatcgccaacttccgacgccacacgctttggatttttatggctgcatcgcgatagtaggccatgtacttggtgaagttctgtcggcgcttgtacttccgccactggccctggatgctgcggattttctccaccagccactttgagcgcgcttgaaactcgcgatagttgaggcatcggcgataccagcgccagattttaccagcgcactccagcttccgttcgtagatgagtcgttgatatcgttgccggccacggtaaccgcgatacacgcgctgaatctcgcgagcgtagtagttgcggattttcatccggattatgtggtgtggatggtagcagcgttgaatccgtcgggcagctagattcgcagtaaagcgccaagtgcggacttctcgacgagctctattacctcgagcatgagcttgaacgtacacgatcttgtccatactctccttgagcgacaacaagtgcaagaagcgacgccaggccagaaaatccctcacacacttttggattttcctcgccgctcgagtttcacgtaaaagtcggcggtttgccagaaacgctatcgtgaatttcttgtttttccacttgcggaacttggtctgcaacatcacagcagctctgtatcgctcctgcataacgcggagcagctcaatgtgaacctttggcagaggctccagcaccatggtcgagttggccccaccggttgcgatcgtcttgatcaacgacgcagtcgtgaatggtttggtgaaaggcaagagagtgtcgttgcagcgcttcactaccttctgggacagtcggtcgcagcctttgagccgcagctcctggatctgttggcaatttgcgcacagtgcgagcagaccttcgtccgtcacgcgcgtatttccacttaagtcgagaatttccaacgggatcttggtgaacgcgagtgcagttagcgatcgatccgtaattccgcgcgtgttggccagtaaaaggacttttaactggaaactacgtgaagcaagcgcttccgtcgcaaaatccgtaatttgcgcacactacacacaataagttagtatgaatgaacacaaaaggttttagtttggctacttgaagcccaccttggataagttaatccactccagttggcggcacgcggctgccagcacgctcacgccgatatcacagacgttcgttccgcttaaatcgattcgtctcaacggatgtggcgggtgaataccacttgctgtagtcgacaccaagttcatgaagcatcctggagtttccaggtcatgccgctccgatacatcaaggactcgcagtttccggcacattttgcctagtaacttgaacgtttgcgctgtgatgttccgacccgaaagtgatatactcgtaagcaccgcgcagcccttggcgatctccatcacgccgctatcagacgctttacgcaaccctttcaggttgagtttcgagatattcccaccgtgctttcctattagcaccaaggaatcgtccccaatattcgggcagttcttcagattgagggacagcaactgggtacgcggactatcgtcgtcattttcatccagattagagatctgatacttctcttcttggagcgaaaagaggtttttgatgccactatccgtgataagggggcagtcttgcatgttgagcttgacgaatacaggcgacgagatcagcggcgccatcagcaacaaggcaaagtccgacagcgccttgcaccgcgcgacgttgagccgctgcaaggtggatccgcagcctttgacgatccagctgaccgccgtctcgtcgattcccagcccgctaagactcaacaacgtcagagagcgaagccctggactcgtttcaaaggcgaagaaggccatgttgtccacactgaggcaatcgtccactgctagatgttgcatcgccatgcccttaacggacgaactggccaggtacgagattccagacgacgtgaggttcttgcactgacgcacgtccagccaccgaagcgtgcaggctgcagatgatcgctgagtattggcaatgcattgcaagaacgcgtccgtgacacccgggcaccctcgaactgagagcgtatgcaagcgcttgcagtctttccagactttactaagcacggcgctggaaaagtggtggcattcgtcgaggcggaactcctgcaataagctcaagtggcggcggatggtattcagcccttcgtccgtgatagcgtggcatctcgagatgtccaaactcgtgaggtatttgagtttgtgcaggtgggcaatgccgtggtcagtgatggaagttccttcgagcacaagtgtgcgagaacctgcaataaagcagccgccaagttagtggacattttctagttgtgactcaacttcgaagagagaggcttaccgcttgcggcaggatgtgacgcgatggcaatcaaccagttgttggatacgcccaagaagttgcgcaagtcgatctctcttttcagcaccttgcctcggacatcctgtcagtatatgtaaacagcgtgggtctgtgtttgtctctctttcgatgaaagtacacttttgccaaaacacacattgtttgttttactcacctggcaaaacagctccgttggaggcgcggccaagctcttcatgtcgccttgacagtgacgcgtagcccccttcatctatcgtcgaaccacgcagcaccatgagagtctagaccagccatcagactactaaagatcgtgccgtctcttcacggccagcgctgaccaaggcagcgacgagctcgacgtacgtgctccatgacgttctcaggcaggttagcagctactcgacgctcgcgttgatgctgcagaagcttcaccctcgcctgcaagaccccatcctcgtactcgccggcatacatcgaggatggatggcttagggacccccccttctggtataataaatgcaacttcaacttgtgtcccttcgtgcgcaatcctgttgaagtggcccacctcaacgtgctgacgtgtgtttgttcgtttgattcagttcatcgaggccatgtcggtgggcgccaacttcgccaaggccaagagcagcatcgcccaccagcggtccatcgccgtgctgacgctctacagctgcatgacgccgctcggcatcttcctgggcatggtgctgtccgattccttgcgcggcagcagcgcgctggccatggaggccgtggcgctgagcatcgcgtcgggcagcttcatctacctggcgttccacgagctgtcggaggagaacgcgagccaggagagccacaccatcgagaagctcgcgctcttctccgcgggcatggccagcatggccgtgctggccgcgtgggcataggtaataatgtgccgtaacagcaggacgcctggggcaagctgagcaagagaaaacaggacattcggacgatcgcattgccacttgctatggagagaccatcacgactcgcggccttgggcttgccattagtaacgacgcggccgccataactacatgtacacagcgctttgccataaatacgaacaagtcgaggtgtcgtcccgagagtttggacaggcaaagaatcgccaaaagggaagaaaagcatgtacacttcagcgtatttgcaagccaagaacgtaggggctgcaacttgcagccatccatccatgcgttgccccaccatcggagctggcggtgcccgctgcccagtgacatgacgagcccgcggcggacagcaccaagcgctcgcttctggcggaaaggaggcgagcagcaggctgcgaattctcaagttacatttttacattgggctcgggtggattttcacctttgtgaggcggtggcgacagcaggagcttggccagatgtggtctcggtgcaggcagggaaggtggcgtcagtgtgtccaccatttgcgggcggcaccgggattcttcatgactcgacaaatttgacaaatttgacattcggcaccggtgccgctccgagattctggtcgaattgtcagccctctccgggaaatcgagctggccttgatcgaccgccgcgtggcaggcctcgcgccactgcacgcactgcaacggacgatcgcgaaaggcagcagagccgttgccgtctttgaagttgctcggcggaggacatagacagcttcgagatggacgccgagatgccatctcttgtccccattgcttcaggacgatcgacgacgacgagcgcacgagccacgtcaagtgagcgggcagataaggggcggcgacctgcacatttcgtagagatccgctcgcctcgcggccacctcggcactcactcactcacccactcatcggcaacagcgaaacgagtcgttgcagacccttttcgacgccgagaaggcggggcgaggcttgcatttggcgcagcctcaaccacctcgtggcgttgcgggccgcgcctatcgattggttcgtgtagcattttgacgctgcagttgacgttgaggggcgtgccgcgagcgctgctgcttcggcggagctctctgctagtggcaacaggcgcatcaagctttcaagctttcgaggggcagtaacttgactcgaccggactaacagcgcattgcctaacatcggtcgtgctggtgtcacgcttcctccgaatggcgatgatactctcagttctttttcaatggggtatacacgtacgttttctagagtttatgactatccaagaaatcaccactaaccccttagaaacacgctctttcaacatgtccgacttgtacggggtatgtgatcgtgcaagtccccagttctgcctacacgaaacatgacttttgccgctcgcgccgcgatgatgcagcggcgagtttacccttttgcctgtcagcgacacacgccgtgcatagaccgcctgggcctggcgccagcttcgcggtgcaccgtatcagcatggcgtgccggttccgatttgcttgccagcccgagccgagcagccctgcccggtgccttccgctctatgcctgcagcctgcaggtgtcgaacaccagcccgccgccgagctccatggtccgccttcgtggcaaacaggcgagagagctcttgccggagtcggcgcctgtttgagcggccatgtgtcggcgccgtcgcagaacctgctcgctcagcttggccgagtggtcaagtccagtgttgagcttaccttactcgacgcttttgtggaacctcgggggtatctcctctatctattcccgacttccagcatcataatcgaggccgctttccgcggtcctcgtgcgtgcgttctgtccgcggcggtgtcggtggccgtccccgttacctagcgccgaccccgccaatagccaagctgacgagaagataagctagggctcggagcctgcagctcccgggcctgcaccgcgccgcatcgggccgtatgactcggtgcgaggccgccagccgctccagcgcacgaaagcgagcacgctgcggggcgacgccacgactgcatccgtttctcgcatcgtcggcggtgacaagagccgagcgagcgccgaggcactcactggcccgagcaccaaaacgaacgagcgcgcagctccgacgcgcgtgctcgcctacccgcggcaaaaccctgcacttttcagaggcaactgcgcgcccaaaatcccggcaaagggccgcacattagccaacatttgcgaaacgctgcgagcttccgtcattttccgctcacaaaaagcaagtcaagtcggaaacagccgccggcaaaatccaccttccgcgtttaactgtcgaacgtggcgaggaccgggcgcttccagccggcggagagacgcgcgccctctttcctcgatcgatcgtcggtcacggccccatcaggagcagccgtcgtctgttgttgccggccggcgcacggagtgagcgaggcgacttggctgccattgcacattttgagcagccagccgaagtcaccgcaagcagaagcagcaatagcatcacgcacagctagctagctagccgcactgcaactacaacactactacagacgctagagtcttccacttcacacacacactccgccgcaccatcatgccgtacgaaagcttcacgccgcagcagcaggtcgagatcaccgaggtcgtgcaggacccggccacgggcgcgtggatgtacgtgctgcacgtgcagcgcggcaacacgagcacgtactcatcgccgcgcgggcccgtggaggagggcttcagccacgagtacgtcatcagccggcgcttcagcgagttcaagcagctccacacggcgctggtgtccgtcatgggcgacgagctcacgccgctgccggccgacggtctcatcacgctgctgatggccgacaaccaggcgctgctggacgagcggcgccaggtgctggcgcagatcgtcatggacatcctgaaccaccccgtggcgcgcgacctgccggacgtgctcgagttcctgggccacgagtccatcagcgccaaggtcatggcgccgctctcgggccagtgcacgggctcgatccgcaagacgtcgagccccgcgtggacggcgctcaactgcgcgtccgtcatgtcgtcgtagacaccggcgtcctcgtgatggtcgcgtgtcgtttggcggtcggaactcgagtgagcggtccacagtcctcatcggaggaacaagtatttaaacccacgaatgtagaatagctgtagagcagaaccacaatgaatgaagtcgatcaatttgtttcatccgagcgcctctggaagctagtctcgtatttcagtgacgagtacatgcatatgtagtatttatctgttgcatcgttgccacgggacttgcttcgagacttcgagtctaggaccgaatatacaacccatacgaatcgaacatgcaacccgcgaggatagacgcgttgcgaggtgatctctttccgggcaggacaagcttggaacccacgttgaaggcaacgcactcatgctgcaacttcgattcgatgctggacaatgcgcgttgttattagtaccgtcgtcataaggacgaggttgtctgtcctttgacagtgctggaaatggcttgtgatagcggcgccatcgcagtctacattcgatgaagccatgaatttctgatgcccgaataggtagaacagcagacggtatagctaacacggtctcgaacggtgctagctcaagagtattataacgatgcagattaattcgaaccgccacgttcagttccggttggaaagctcaagccagtgggcattgtgagcgtcgtcgacgacgcatcgaagaacgcaatgtactgctttgaagtgaagcagcaattcgcaatgacagcagacagcttcaacgtcgaaggccagcaatctctttgcgagcgctcctccttacaaattccaagtgccgaccccttgttccgtctctgcattatccataattagcaatccaacccacctttatttatcatccaatcgtctcaccgccccagtcttttttaaaatagaagagatgcgctaatcgacacctcgtgcgtgaccgattagagatggccgggcctgttcctgcgacgtgtgagctctgggtcaacacgcccttatgccaacggggccagccattccgcatcgagctcctcgcctccagcagctcacttcttcttcctcctctccgttctattagtgcgccatgactgccgcgacgtccggccccttgttgcgcccgctgctggccgcctgcttctccgccagcgtgcacggcggccgcgtgatccgcgaggtggtgcagcagcacgtggcgctcgacatggtcaacaagcaggagggcgcctacgatccgcagacggtggctgaccgccgctcgcagcagcggatcatccacgcgctgcgcgaggccttcccgctgctgaccatcgtgggcgaggagggcgagctcgccccgcccgcccccgaggacgtggtcaagtgcgacctgcacgcgctggacgacgtggacttcgaaggcggcgaagacgcgcagaaccgcgcgctgggctggaacgacctcgtgctgtgggtcgacccgctggacggcaccaagcgcttcgccgccaagctctacgacgaagtgtcggtgctcatcggcatcacgtacaagcagcgtcccatcgcgggcgtcgtccacctgcccttccacggcgagcacggcgtcacctactggggtacgcgcgcgcatcttgtctcaccagtgtggtattgtatgagtggactaaacgttatgactctgcttgtgttgcaggtggcccggatgttggcgtgttccgcagcgagcacgaggagagcgaagcccagacgacgcacgccaagttccccaagcagacgccgacgttcccgcagcgctcgctggtctgcaccgtgtcgtcgaccaactgcgacctcgtgaacagtgccatgcggctgctggtcccctcctcgatcctgacgggcggcgctactggtaccatggtgctcggagtgatcaccggccacagcgacgccttcttccgcttcaaggcggcaacccgcaagtgggatatttgcgcggtggagcctctaatcgaggccctcggcggcaagctgactgacacacagggcaacgagtacgtgtacgaccacgtcgccaacgcgcccgacttcgacaacgagcgcggactgctggcgtgcgttgagcccgaggcacatcaaacgttgctgaacgtcatggccaaggtcaatctcaccaggtagatggctagctatacacaaaatacattcatgtgtactgatctgcggcggcttcttgtgctgcttccagtgcgctggatggccgcgagttgacgccgcagtggtttcaagagtgtgttttccctgggcgaaaagtgacggcagtgcacgtcgtgcccagatccatccaccgaggcaagcactcggctgtcgcgaaactcgatgtctattttgcagacaatggcagcaaaaccaccgtgttcctgaagaagtccgtgaagaacgacctccccgcgcgatcggctgcacactggaaacgggatatcgcctcgtattgcaacgaggccacattttattcgcatttcgcgagtgttgttcatgcgcgaggagtatcgctgatccgaccgctcgcagtgttccagagcaatgctgctggccaatgtacggccaacatggttgcagccacggccagcgatgcagagcatgcagctacgtgctcatgtccggaaaacttcatgatgctgctcgagtgcctgggatcagcgtctccggcatcgtctgcggcggacgagtcctgctcgctggccaactacgaggccgctgactgtcttgagctcgcagacacccgccaagcattgagctaccttgcggatctccacgcgtcggcttggggtcaagaagatctgctcgaaaatgcagcttcggagctttggtctgctgcctgctggtgggcatttccgaagcgaggcgacaaggaactcgcccaggcgtcggagatttggtcgcagatgcttagtcactggctcaaggtctttgaagctgagtcatcgttaccatcgacagcagggctcgagtctctgggcgagcgcatgatcgaggaagctgcgtacatcagcaactgtctgtccgtcgacgccaacccggagttgagaacgctggtgcatggcgacttcaaaagcgccaacctgttcttcgaggcgacatcgcgcaaggtggtggccttcgactggcagtggagtggcgtggggatcggagccatggacgtggccaacctgctcaacacgtcggtgagtatctctctgctcgccagcgacgagcacgagcttgagctgctgcggttctactacgactgcctcagcgagagactgcaggcgcttggggccacgtctgacttgcagaagagctacccgttcgaagccttcgagcgccactacatgctggcctcgctcgagtacgcacgcttgctgatctccaacttttggaagctcatgacgcccgagagctgcgcggccaaggccggtaacgccaactgcggcctcgggtacaggtcggccccgcatgtcgtgcgcatggtgcgcaagctgcaccagggactggaacgcgtcaaggcggagcgtgtgatggtataaattactacattactcttgttatcggatcggagctcgatgcgctcggatcgctcgtggggctggtcggattctaaacactttctagccggccccactctagtcgcgcctcttacttgtgtacatgcacgctgcgctcgacttgctacggcgacgttaaaacttctcataaaaacttggttcttctctcgggcgtgcgtggttgggttggtacttcactggagtcttcaggtcatgctgaagtgcgagaacggcacgtggttctcctgctcggcggcctcgcgctccgcgtcctgctggtagtacgctcgtcgcagcgcgttggccgagcgcgacgtggtgagcatgttggggcccacgaagtcccgcggcgtgacggtgccgtcctcgctgaagctaaagctgctgcgcgagctgatgctcggcgacagcggagccttggccacttcgtcgtacgagttgaggttggccaggaactcaatgtactcgggggcctcgctggccgccgggtgggcctcgatggccgtgagcacgcgctccagcgcgagccgcttcttctgcagggccgtctgcgtctcgcccacgaagaaggtgagcaggctgtcgttgggcagcttgggcagcgacgacttgccgcccttggtcatgagcggggccacagcctcgtgcagccgcttgaagtcctcgaagctgcggcgcaccgcgtacgactgcgtcgtgcagggccgcgaggccagcttggagacgtccgcggcgtcgcgcttcttgaggcgggtggcgctggcgttgggcgccgcgttctcctcgccgaacgagcgcgtgacgtgcagcaggtatcgccaggtgccggtcttgcggtcctgcacgaggccgcggatggccacgtgctgcgaactcttgaagctctcgtagggcatggggcggcgacgagcagagcggaccgagtcggcgacgtcgagcaaatgcgcgaatgacccgcagccgagcagctccgccgcgccgctgggcttgtcgcacgacggccgacgcggcgacgccgaatccgggagcgtgcgtcgaagtccaactctgacgatgcaggttctttcggggggcccgtttgccgcgccgtcgccgatgcaaatcgttgcgggccgcagtttcctcggcgacaggccccgcgcacgcgcgtgcactcggcgttatacatatccgcggcgagatccccagcgccagcgacaatggcgaagcctggcagcgacatggtcgtcgccaccatgcgagcttcgggccggggatcacatcggagcgcgtaggggcagagcgcgcgtgttgacagcggccttgaagttgacgaggcccctgttaagcctggcgtttgccctccatcgaggctcgagcgggatcagcccgatccgtggcggcgctggcgtgcgcggcaccggagctgcggccccgactccggggctgattttcaaatcaggggccgatctggaacgcgcacgacaccgagcgctcacctgccggccaaagatccatgtttcgcccacggacgcgttcgatttcggcccaggtcgccacacacggtcggaccccgcctgcatcggcggccagcactgcccggagcgagcgagcgccaacgtggcgcccaggctcagcgcgccatgttggccgcgccgctaacggatcccgaaccgcattgcggtgatcgcccgctttagcggcgcaggggtgctgccgagaaagttctgcttggatcgcgccgcttcgagcgatataatatggatcgcggctcgtcacgccgagggcttgcagcgttgcttgcttgccaagcagtgcttggttggtttgaagacgacgctgcccgctcagctggccgatcggcggcggcggatatggagcaacggcggagagaaaccgtggctgccggccgccttgaacacggcttgcagcctgcggcatccgcttcaacgtcgagcaaagaagccacgcggtcagtcgacggcggcggccatgattccccacgccaacgtcgcactgcaagcgtttcagaggcccggcagcggattgctgagctggggcggagcagtgtcgtgggcggcgacgatgaccagcgccgcgagagcagcgctgcaggggggggaggcagcgccaagcagactgcttgagtgggggctggagacgctacatggctgggtctgaatcagctacacattctgcgaaagtggaaaattcctccgggtgcgtgaatcttccggcggatctgaaatgccgcttcgagagacaatgggctcgaatgtcactgtgaagccttgcggcagggcgatgctgcttctcagctcccctgccttcgtctgctgcgagcagcactgctctgcgatggcgtcgccatggcaagggctctctcgcagactccaaacctcaaagacaacaaacaaagcggacagacaacctcgtccttatgacgacggtactaataacaacgcgcattgtccagcatcgaatcgaagttgcagcatgagtgcgttgccttcaacgtgggttccaagcttgtcctgcccggaaagagatcacctcgcaacgcgtctatcctcgcgggttgcatgttcgattcgtatgggttgtatattcggtcctagactcgaagtctcgaagcaagtcccgtggcaacgatgcaacagataaatactacatatgcatgtactcgtcactgaaatacgagactagcttccagaggcgctcggatgaaacaaattgatcgacttcattcattgtggttctgctctacagctattctacattcgtgggtttaaatacttgttcctccgatgaggactgtggaccgctcactcgagttccgaccgccaaacgacacgcgaccatcacgaggacgccggtgtctacgacgacatgacggacgcgcagttgagcgccgtccacgcggggctcgacgtcttgcggatcgagcccgtgcactggcccgagagcggcgccatgaccttggcgctgatggactcgtggcccaggaactcgagcacgtccggcaggtcgcgcgccacggggtggttcaggatgtccatgacgatctgcgccagcacctggcgccgctcgtccagcagcgcctggttgtcggccatcagcagcgtgatgagaccgtcggccggcagcggcgtgagctcgtcgcccatgacggacaccagcgccgtgtggagctgcttgaactcgctgaagcgccggctgatgacgtactcgtggctgaagccctcctccacgggcccgcgcggcgatgagtacgtgctcgtgttgccgcgctgcacgtgcagcacgtacatccacgcgcccgtggccgggtcctgcacgacctcggtgatctcgacctgctgctgcggcgtgaagctttcgtacggcatgatggtgcggcggagtgtgtgtgtgaagtggaagactctagcgtctgtagtagtgttgtagttgcagtgcggctagctagctagctgtgcgtgatgctattgctgcttctgcttgcggtgacttcggctggctgctcaaaatgtgcaatggcagccaagtcgcctcgctcactccgtgcgccggccggcaacaacagacgacggctgctcctgatggggccgtgaccgacgatcgatcgaggaaagagggcgcgcgtctctccgccggctggaagcgcccggtcctcgccacgttcgacagttaaacgcggaaggtggattttgccggcggctgtttccgacttgacttgctttttgtgagcggaaaatgacggaagctcgcagcgtttcgcaaatgttggctaatgtgcggccctttgccgggattttgggcgcgcagttgcctctgaaaagtgcagggttttgccgcgggtaggcgagcacgcgcgtcggagctgcgcgctcgttcgtgagtgcctcggcgctcgctcggctcttgtcgccgccgacgatgcgagaaacggatgcagtcgtggcgtcgccccgcagcgtgctcgctttcgtgcgctggggcggctggcggcctcgcaccgagtcatacggcccgatgcggcgcggtgcaggcccgggagctgcaggctccgagccctagcttatcttctcgtcagcttggctattggcggggtcggcgctaggtaacggggacggccaccgacaccgccgcggacagaacgcacgcacgaggaccgcggaaagcggcctcgattatgatgctggaagtcgggaatagatagaggagatacccccgaggttccacaaaagcgtcgagtaaggtaagctcaacactggacttgaccactcggccaagctgagcgagcaggttctgcgacggcgccgacacatggccgctcaaacaggcgccgactccggcaagagctctctcgcctgtttgccacgaaggcggaccatggagctcggcggcgggctggtgtccgacacctgcaggctgcaggcatagagcgaaagcagggctgctcggctcgggctggcaagcaaatcggaaccggcacgccatgctgatacggtgcaccgcgaagctggcgccaggcccaggcggtctatgcacggcgtgtgtcgctgacaggcaaaagggtaaactcgccgctgcatcatcgcggcgcgagcggcaaaagtcatgtttcgtgtaggcagaactggggacttgcacgatcacataccccgtacaagtcggacatgttgaaagagcgtgtttctaaggggttagtggtgatttcttggatagtcataaactctagaaaacgtacgtgtataccccattgaaaaagaactgagagtatcatcgccattcggaggaagcgtgacaccagcacgaccgatgttaggcaatgcgctgttagtccggtcgagtcaagttactgcccctcgaaagcttgaaagcttgatgcgcctgttgccactagcagagagctccgccgaagcagcagcgctcgcggcacgcccctcaacgtcaactgcagcgtcaaaatgctacacgaaccaatcgataggcgcggcccgcaacgccacgaggtggttgaggctgcgccaaatgcaagcctcgccccgccttctcggcgtcgaaaagggtctgcaacgactcgtttcgctgttgccgatgagtgggtgagtgagtgagtgccgaggtggccgcgaggcgagcggatctctacgaaatgtgcaggtcgccgccccttatctgcccgctcacttgacgtggctcgtgcgctcgtcgtcgtcgatcgtcctgaagcaatggggacaagagatggcatctcggcgtccatctcgaagctgtctatgtcctccgccgagcaacttcaaagacggcaacggctctgctgcctttcgcgatcgtccgttgcagtgcgtgcagtggcgcgaggcctgccacgcggcggtcgatcaaggccagctcgatttcccggagagggctgacaattcgaccagaatctcggagcggcaccggtgccgaatgtcaaatttgtcaaatttgtcgagtcatgaagaatcccggtgccgcccgcaaatggtggacacactgacgccaccttccctgcctgcaccgagaccacatctggccaagctcctgctgtcgccaccgcctcacaaaggtgaaaatccacccgagcccaatgtaaaaatgtaacttgagaattcgcagcctgctgctcgcctcctttccgccagaagcgagcgcttggtgctgtccgccgcgggctcgtcatgtcactgggcagcgggcaccgccagctccgatggtggggcaacgcatggatggatggctgcaagttgcagcccctacgttcttggcttgcaaatacgctgaagtgtacatgcttttcttcccttttggcgattctttgcctgtccaaactctcgggacgacacctcgacttgttcgtatttatggcaaagcgctgtgtacatgtagttatggcggccgcgtcgttactaatggcaagcccaaggccgcgaatcgtgatggtctctccatagcaagtggcaatgcgatcgtccgaatgtcctgttttctcttgctcagcttgccccaggcgtcctgctgttacggcacattattacctatgcccacgcggccagcacggccatgctggccatgcccgcggagaagagcgcgagcttctcgatggtgtggctctcctggctcgcgttctcctccgacagctcgtggaacgccaggtagatgaagctgcccgacgcgatgctcagcgccacggcctccatggccagcgcgctgctgccgcgtaaggaatcggacagcaccatgcccaggaagatgccgagcggcgtcatgcagctgtagagcgtcagcacggcgatggaccgctggtgggcgatgctgctcttggccttggcgaagttggcgcccaccgacatggcctcgatgaactgaatcaaacaaacgcacacgtgtcagcacgttgaactgggtcaagtgggccagctcacttcaacatgattgccactctggccgggatccgtatcctatttaccttgtggctgaagatggcaacagtggtggccacggccgtccggtccatggagtggttgactccgagcgcgaagccagcgatgagcgagtgcaccgagaagagcgcggctaataaataggggagaaagtagctgcacagtccaagtcaaccgtaacacaaaagtgtagcactcacttgtcgtggttgctacaaacatgagtatgctcggcactgtacctctcaccggagaacacgatatgctcgctgactgtggattccgtctcgtgactctcctcgagcaacccagtcgtaacgttagcggactcgtactccatcacgacctgagctcccacaccgttcacaagctgcactcaacagtgttaagcgtgatatacgtactcatcattacaaagactgcctttcaacgcaccttgacgccgctcggcgtgagcaggcacgtgccctcctccattttggcagcgcgatggaacatcgaaggtgatgacacggtgccgcacgagcacgagtagaagcgctccttgccgtccacggagaccgatcgattcctccacccgaacgaggtcacggacgggatctgcactcggtacatgctggtctcatctgttcaacccaacgtcagtcctctcttcaacatcatcatgccggcccagcaggccacgcagtacgtacggtcgggccgagcagcactggccacggccatgagcttgccggagttgcccatgttaagcaggtccacgctccagacgatggagcagcccaaggcacagagcaggtagacgctcgggaacgccgtcatccagtgcggcggcacgtccatcctggccaccacctcgtcgtacagcttgactgcatccggcagcaagtgcagcagcccggagcccaggaacacgccggccgtcgcgaacggcagcttgcggctcagcaggttctgcgcgcgccgcgtgccgtggctcgacacccacaagggcagcagggccgacgcggccgtgatcaccagcagcacggccatggccgcgtacttgaacacgcgcacggtctccatggacgccgcctcgacgtcgtcgcccacagccgccaccatcgctcgatactgaattggccggatccagtgactcggatccaacagcttctgtagctcctcggcgatttgggccgacgcgggcgagagatggcctgactactgcgacagacgcgagtcaagatcgcgacttgaaccggcgctggttcatcagatcgagcggcgccggtcgcgaggcccttcagagaactattcccccgctttcggagatcgtctaggagtccgcgtgatgatggccaagctgggctgcttagtggccctggggctgctgtgcgggccgggccacggtaggccgtgttccaggttgaggtgacttgaagtggcccgacctgaccggggtctctctctctctctctctctctctctctctctctcttgttgtggacagctctgcggtcgtgcaccaagggcggccaagtgcgcgtcccgtgcgcggacgagctgctgctgggccggtcggaccggttcctgctcacgctcttcggccactcgtgctatacgatgaacatcgtgtcgccgcagccgctcgaggtgcagttctacgactcgagggacctcaagagcggccagctcaacacggccccggccgtccgcaagctgcaggagtcgacggaggaggaggaggcgcttaatgcgacgctcaacagcctggccgcgttgggcgacaacaaggcgtgccacaacgtgctgagctgctaccagctacaggagggactgtccaaggccgcagtctacaacttggtcatctcccgctgggccaatgtcagcgccgacccgacggaggatggccagcaggagcaggtgcaggagcaggacgcccccattagagtcgccgtggagctggaacactgcgacccagtatcaccctggcactacgtcggtacgtggagctactgagtagatatggaggggtgatcctatcctgttctaacggtagagctgttgttatactgtaggcctggtgttcgtggggagcatcggcttcacgtcgacgatgctgctgctgtgcattgtcggcgagttcgttctcgggctgcggaccatcacgaagctgcaggcggcagcgcagagagaccgactcgtggagctggcccagatcgacccgaccaagatgaagaaggaggtcgagaagagctccgaggattcggacgattcggaggaaccggagccgacggcgccgctcatgtcgacaggaacgtcggcggactcggagccaactgcggagcccgaggcccgctctccagcttgaagacaagcggaactaattcttacgttgtagcagtatgacattggtaatgaaagtcgcgtttcatggcgaaaagctagcagcaaatgcttgccgaggaagcaccaaatgccgcaggtggcgatggactaaagcaagttgcctacaggtacatgtagcaaacttgattcactcctcgtcttgttgtacggggctgacgcactcacgcatcagtgatgtttgggctgatctgctgcaaattcaccagagagaatgcgcgtcttgagcgcgtggaagtttgtatcttctccctcgaacgtcagtcgcttctgagccttgaggagaatgcgcatctcgttctggttgttctcgtcaacctcgaggcccttgtcgatggtcttgaaatggtccttgtcatcaaggttgaggacggtgaagtagcttgcaacacgagacaaaatacctggctcagtccaagcaatggagtgaaacactccttagtagtaacatgagacgtacccgctgtgagactttcgcttgccgccgtcaatgatcgagtcaattagcacttcgacctcgacctccaggtgaaaacgactgcgatacagcagcacagttactgttgtgattgcagatacttcgcaccaaaacatgaccgacttactcgacgttgacgacgcgagcacgcatcttgaccatgtcgagcatcagaatcggcagcttgaagagcacgcggttcatggcaatggtcaccattttctctgatcgggtgaacttctgagcgcagcgtagagcgattttgtcctggtacacaccactaatgtgagatttcccttccctcttctcttgtcatcgcattcagagcaattcgtaccatccaagagagcaagtcgccgccgaagaccgtgtcgtgcggattgaggtggcgaggcaagaagcagttgcgcacttcgacctccgtctcactcacagagacgtactcggttttgctctcactcggaagcaagtcttcctgctttatgaacggaagtttgtccaccgcttcttggtccttcatccactggaaagagagttccttgcgctgtcttgcaagctcacccattctcgcgcagtagtcggcacgatccgcatcgagtggctggggaaaacccttcctagggcgtccgaagcggttgatggcaaccatcgtgatgatggcgtcgtgtgtgtgctggagcgtgtctgttgcgatatcgtggcggaaaaccctcacttgcactgccatcgacgagttcccgaggccaattacctccccttccagccgcacatggtcaccatggaacacaggcttgatgaggtctacacgatcgaaagagatcgtcgctgctgcccccatcgagagcctgttatacatgcatgcaacaccagttagatcaattcttcccaacactcatctcgatgtgccttcggtaccgatacgaaatggccccagctaccacatccatgagggccaggatcggccccgtgcgaagcattctcctcttggttttcatcaccctacggtagtccattcgagacatgagaccgtaaagcgaatatatcaatgcacgtagcctaaatttcgtacgataacgtcggtgataatcgattgagtgtctttcgggcgcacttgcgcaggcatacgccgcatgcgccataggtccttggctgtgccgatcaacgccttcagaagcatcgttcatgtatcgagcggacgcacgttcggcttttacgtcggcttcaactcactttgacaaagatcagatacaggttacagcactcagttcacatttatattgccaggtctaatggtgcttatggcggccaaatcggaaggctagcactacaatagctgcgagctgcaacgctgctgcgtaccccacgagaatgagcatgttgcgagacacgttgacgttctccacgccgtagcttttcagcagctcccaggcctcctctgtgttcacttgcgagaaatgctcgtacatgaacgcctcgaacgagtacgtgtggaacgcgaggtagtagccccacttccagtacgcagggatcgcatcgaatggcaccataaagccttcgcacagcatgaacatgccgaagagcccagcgcccagtgcgatgcccattatatagtgcggcaccgcagcacccagcaagtgcatcatggactcggccgtgaccagcgacagcgtcaggttaaggaagaaggacccgaacgagtgcacgtgggcgaagtagacgacgatgaatgccgccaacaacgagatgaacatgacgccgggcagcgcaccgaggagattggccgtcgtgtagctcgcgaggtgcagggaatgggaccgaacttcgcgctctaacactgcgcgttgctccaatagagcgggcagagctgcaacggacatgaagaccaagaaggcctgcacgtagaagagtagcggcaccatagcggaacttgtaatgtcttggttggagctcaagtacatggtgccgaccatgaaggacagcaagatgtacatgagcacgcgcagccagaacacgcccgggtggcgccaattgttgaccaggttgcgatgcaatagcacgcagaactggtcgagtcttgacggccgcatggctcgcaggatggcgacgttgatgatgttgacgtcccgcatgtagcgatctcgagccacgtcaacgcgcagtcgctgcggctcggcgccttcttccagtgcttctacgaacgggccaagcttcaaccccggatggaagtccacgttgactagatgcacaaaaaactccgccggattcgaatagagtgggcacacgtagcccatggagaagaagtgtgtgagagctgctgccgcggggccgaagtacacgagctctccgtcgctcaggatcaccaagttcgtcagcatctcgaacactgaagacgaaggctggtggatggtgcagatgacgttcttgccgtcttctagacacagtcgctcgatatgctgcatcatactccgagctgacgaggcgtcgaggcccgatgttggctcgtccagcagtatcaacgctgggtctgagagcagctctacagcaataccgagtcgcttgcgctggccagacgaaatgcccttgtggaagatgtccccgacgttcgcatgcatacacgcgcgcagccccatagcgtcgattacgtcttgaactcgagactcgcgcgtaagtattggtacgtggctgggcagcccaaggcccgcagcgatctgcagtgtctcaagaacggagaaggatccgaggaacgccatgtcctgcgagacgtagttcatgatgtagtggaagctgcgagggttccgaggatggccatttacatcgacaatgccttcgacacgcacgccgggacctccaggcggcactcgatccgctagaatgtcgagtaaagtggtcttgccagccccggaggggcctatgatagcggtgaggtctccgggccccgatcggccccacacattgctcagaatcttgcgcggttgttggttacttgatccgctcttggtgcttgtgcacttcgacaaccagcgcttcttgggctggatgatgtacgacacgtgctgccaactgatgcaacattgctgcaaggaacggcgctgacgacgctgagcagactcgcactctgctgtgaagttgaaggacttggccttcccctctgtactgacagcacagtcgaccgcgatggcgtccagacacccgtagtgagcctccacggcgttcgaaggagacatgaggtcgctttggggcgtcgtcaagctgcacccgtgtccagtctcgagctctgcgttgccgatggcatggccgataccggacgaggagctggggacctcgtcgtcggatgcttcgtatggagttggcgtgagcggcgtgttgctggaaatgcaggtatcggccatggatcccgcgagtcgtccgcgcatgtcgctcggagaaatgatggagtggagcgggagggtgacaacctgtcacggggaccacgctttgcactatgctggaggttacacgaacgtagttagttgttctcctggcgcttcctccttgatagacagacacttttccgccgctggaaggaaggaacgacgcgcgcgaatcctattcacgcgcgagatggttacgactcgcagcacgaccgcaatcgcagaagacacacacacgcgcgcttggaggtggtgctgacaacagcccagagcatgcagcagcaaacgcgctctgcgtctgtctgtccaggacgagtcttccgcggaaatatggctgcagcgctcgtcgagcgtttcacggatagcagcaagggctctcttccagcaatactccgcacctcggacaagtccggttctcggacgaacggcacgaaggtatcaagaagagcatgtcatgttgatcgagatggctctgaatgcccctggattgctggaaaatgcttcaacgttgctgaggtgggggggggggccattagtcgagttgagaaggctaacgctatcattatgagcacgtttacagccaccgacacccatggaataccgtcaacgcactgggaggtggcagatgattcacgttagcatgtaatggccgacaagctggctgtatctgcgacgcaagagcgctcgtgctcgtccagacgcgctgtctggctgcttcggaggctgaaatcgtctagcagcgccgtcctctctctcgcttcgtactatgcagcagacatgcggtgccgaggagctcatatgagttggctcctgtctgcgctagtcgtcggtcagcgttggatattgcgatgagtacacagcgccacgaagccgcgagcagcgccagcgacttgcaggataagagcgactgtcgacgaatcgcaccggtcgcgactgacgatcaaactgagcttggccaagacagagagagagagagagggagagggagatagagacccaatctcgcctcaatggcgccttattcagcccagtgtgcagcagttcagcaggataaacgcagcacaactgccatcagaggtgtgcgcttgaacggacacaagttgaagtggtgccgacttaattgctaccttcgtgtaattggctgaaaagagcccattcacgatctttgattggctgatggtcgaagaattacggacactttagtcgattcgctaattccgcgtcgtaaacatcggaaccgcggataccttcccagctgggcatcaacaacgccgcgagcgattccgcgacgcggtagtcgtcggcatgcccccacatgggcaataggaaccatcaccagcaacgagggcaacagcgacaccacattggcagctcaggcactatgagagacgaccgggaccccgagaagcgtttttagcatcattatcccgcttaagtttacatgagacatgacgacgcggctgcatccgtccaaggaacagttttaccaagaacgtacactttacttaagcgagctgactcagtaccaagaccttcaatactacaaatcactatatagatagttttgtgtcacctatcaggtttggcagaactcctgaatcaacatcatatgcgcgtctaaattacaattccagcaatcgtaagaactatacggagggaatcgcctcgtgcgaggttatcccgacgttccgcccagctctcgtcacttcacacttcgactcgaaaagcgccagcagagaccaaacgtgcagagcactgaccgcctgcctccgagcgagatgggggccggcgaacgcatcgcaatgccccgcttcctgcgcgagacctcccgcgagcgcgcgcccgacgtggcgccctccgcccccgcttccgcctccgcgtcgccgtcgccagcgtctccaagcgccggcgacgcggagccgtccatggtcgaggagctccagcgacgcaaagccgccttcttggcgcacttcaagagcaacagcgcgcccgtgagcagcgccgacgacgcggccggacccacggcctcggacttcagcagccagcgctcgctggacgccgcgatggcgccccacagcggcgcggactccaagtgtcacgtgtgcaatgtccctctccggcttttgcgacttcgggtgggttttattagactttgtttgggtgaattcgtgggtcctattagactgatgatgggttttattggcgtgaatgcgacagcatcggtgccggaattgcgggctggccgtgtgtggcgtgcacagcaagaaccaagtgccgctgccccacttgggcatcatgaaggaggtgcgagtgtgcgacctgtgcacgaggcagttggtgcagcgtcgagcgggctaccgcagcccgaagaactccaggtcgaggcagaactcgaacccgaactatgttgagcgagagagcgacccggagctgtcgccgctgacgggggacaggatgccggtgccgctggctccgttgacgccgcctgaatcgggaaaagatttggacgtgatggtctcaacgcctgatgccggtggtcgcggcagcttcagcttgaacacattgggcagtggcgtggtgaatagtggctctaatgccttgcccggcattctgtacagctgcctgctggaggagcaggacaacacgatggatgagattttgtacctgggcacgttcacgatgggtgggcgatccctggcgagtcgacgtatgagtgccaatgtggcgctgtggaagtggcgaatcttcatgctgacgacggcggagctgctgtgcttcaaggccacaggatcgattagcgatgatgactcagctccgttgtcggcgatggcgctgggcgaggtgcgatcgtcggttcacctgtcggatattttgcacatcgaagtgaacgaccaattcccgcgtattctcactgtgatccgatcggacggccgggtgttccgtgtgcgtgcgcgcaccccagagcagtgcacggagatcgcggcggcactacgcaaagcaatgcagctcttccaagacgccctattcaagctgcagcgtggccctcagcctgaggacaactccatcagttgcgtcaccgtccagcacgagtcgtcgctccccgagtcgatcgtcatcagcaaccctgctgttggcgaagctttccaagtggagatgtatccctcgagtattctccgattctacgtgaacggtccttctgctaatggaaccgcgctctactcgtgcgaaatgcttactcgcgggaagaaggaggttgctgtagaagccgaaccgttagggaacggtccacgcgacgaccatgtactgcatgttgccgtgaagtcggagaagacttcgggcagcctggaagactcggacgagacaaatcgtcgtttctggggtcttacgtcgttcctggcagcggttgcggccgtcatgaactcgatggacaacggctcgttcgaactgctggcgtggctgtcggctctcgttcttttcctcacccgcttccacgaacgtatcagcgtgttgctcacgactaggagattttcccgcgcgcagcagttgcgcgtcgagtgtgtcagcatcacgatgggcaagagtgaaggctcattggagggcgatgatgacgagcacggcgaagagaagggtgaggtgaacactcgcttcttggccggctgtgaaggcgatgtcgaggaagcaaaggagcgttatgctgccacgatgaagtggcggaaggagaacgacgtggatacgattttgatgcgtccgtcgcacgtgttcaccgacatgaaggagtgcttcacgcactttttgcacaaaaaggatcgacagggtcacctcatctcgtacgagtttcttggcggtcaacggaaggcgctacacgatttcacggctcgtggagttactgaactcgaggctattatgcaccacgtgcgcatgatggagtttatgtggaatgttgtcgacccgcgagagtttcccgatggcaacatgctcaaaatctatgatatcaagggcatttccatggccgacatgtccagcgatgtggtcaactacacgaaaaaatggggcgaggtgattgccacttacaaccctgaacgtgtgtaccaagtgttcatcatcaacccgccagcttggttcaacctcatctggaagcttgtctcgccactcgtcaaccccaagacgcgcgagcgtattcacgtactacgcgggcaaaaagacatcacaaaggcactgctggagtttgttgccccggagaacctaccgaaggaatacggtggtgagtgccagtgtgaaggcgggtgcttcacccactcaccagaagagaatgacattcgtgagtggacggagttcgtcaacgccaactaccatggcgacgttaacgaccccgtcctcgtcgaagcgttcgataaactccgcggcaagtatcagaagcagcttccacccccgggctccaacaccgtcgcaccagcattaccgaatggtactctgccatgagctgttcacacgaagtatcagctttagctagctaattattcacatagccttactctgaagtgactcgcactcacgcgcaagtcggaactaaatgattacacaaacttagttgctgttgttgctgtcttcgaggtgcatgaggtcaactaggtggcggagagtagggcgcctgtagaaagagataaaaaagctcgtgagaacccacgctatggccaaataccagcagtacgcttacccatgcggacaattccaaggttgatccaggccagacaggttgcgaacaatctgcgcacaacgatggtaagcacgaaagcaaaccactatctattcctacgccacataccttctgcatttcttccttgtgaagagcagtaccaatcatgatcgagcttctgcacgctcgcgacgcaaacattgccattaccttgggcaggcgaatagtggtcggattaagcggagcgtccatcagtagcgatgctagttcccgaatgtctgttgtcaaaacacgaagctacagtgaatacttgaagaactcgcagcaatcataactgtggtgacttaccttcggtaccaaactgcgtgtgcttggtgaatggcaatgagagcagcttcaatttttttgttgcaggggcatctttatctaccaaaaaggtgaatccattcttggcgaagacatccagatggtccaatatgaccatttcttcgccggccgtcagctccagtatcagcggtcggacgagaggctgctggtgcatcaccgtcgtctgctgcaacgtttcatagttgaatttttcatcgcttgcatgctggtcgatgatgaaaagatcattatcgagcttgccgataataaatccaaggttgaactgtccgagaacctgcatccgcttgaaatcttcctttttgagaacgcgttgcaatgcggcagcagcaacctcgttgtctgttgcagtagcaccatcgaccgatgtggagcaggtcttcggcaccttaagatggttcgtcttgcgcttcttttcgtactccacttctccctcaaaatactgttgtctctgtttgatcatctcgtcaaatgaccacacgtgttcttccggtgtcgagggagttgactctgatggtaaagaggggtagagtttttgccgcttggcaggcttccgcaaatccaacacgaccgactctggggatgatggaggggaagcaggactcgtctttggtgacagtacaactaccggcttgccgctttgccccggttgttcaggagtgcgtatcgtgcttatttcacgctgaaccttgggctgaagaacttcgacaatgacatgttttgctttcggtagctcaggttcaaccctttgcgcttgggaggaatcgtcttgagcagttttcgtagtcacctcaccgtcactgccatcttcgttttcatcatctccggcttgaacagcaggtacgcgttccgtttgagtctttgactgttcgaaatcattcttttgaggtgtagccaggggagactttttcgttgattcttctgattttgtggtgcgagcgaatgctgtcatcaatggctggactgtaaaagttcctcggcttggctcgtacaatttgttaagtcctgttctgaaagcgtcgataatttccgcttcctaaagcacaacacgtaaaatttatgttgggggtcagttatttacctaaccagtgcagcgtgactaaaccacgtacatgcttcacaaacgtctcacgcttgtctggagtgacattcacatcgtagtcgccaagagggagatgaaagttaagcacgcaagcaggcttttgcttcatttcgtattgtcgccacacttcattcagcgtcttcgacatctaatagcacaatgttggtacgatgcgttagtatcttcaattcaaatataaaagcaaccagcaaacacacctttggcaaatcaaatggccgcccgttgatgaagaaaaactgacgatcattgtcactcctgccgacaccagcgccaaccttcgacacaaagccctccaccttgcgtttctgtccgctcaaattgtcgtcttccattgcagagctcttctgctcactgtcactgtcacaatcaccatcactatcgccgcccttattctctgtttccactttcaaagcaccacgcaactcgaaatccacacgaagcagcgtcctgaagaacttggtaccaaacacattggcaatgttctcccccatcgtctggtgtgcttgtgtagccagcaccacgtgccgattcgcattctttcccgtgatattaaacacacagatcttgacgttcgcgcagctcacagcgtaggcctgcagcaccttgagcagcttggcgtagtgcttcttaatgttacgctggaagtccttgtaccgcaccgccagtggctacaaaacatcaaaaagtaataaatcaacgctttcactctcaacttcctctcttcaccttccgtggctctcctcaccttgaagagctcttccacggagaccgtggtccctacaggcctcgccttcttcgtctccttcaccagctgtccgctcgtatcgtactccagaagcgcccccaccgcctcgttctgcgtcctcgtacacacagagaagctcgctgccaactcacagaccgagctcaacgcctcacctctaacgaagaaaaacaaataattgcttagagcctcatgggaaagtatcatgtttccaccgcccaggccgcaccggaagccgaaggacgcgacggtctcgatgtcctcgaagctgctgatcttgctcgtgtaatgcttgcgcgccagcgacgcgtagttctcgggcgcgacgccggcgccgttgtcgctgacctcgaaggcgtcgcgcccgaactccttgagcttcacctcgatctgcgtggcgccggcgtccagtgcgttctccaccagctctttcacagccgtggccaggttcaccaccgactgcccgctgcagatgcgctgcacgtcgcggcggtccagcacgtgcagcgccgacgtcggcgccgcggcgggtacaggagccatcgcgccgagtgcggaatcgagagtgatggtcggttcgacgcgcgaaaacctgtcccaaaacacgaaaaccaagatacctaaactatagttttgggcttttattcaattaggtttgggctccgcgtctcgagccacgaagtgaagtgattgacgacgtctgctggaagatggtgctcaagaagctgctgggcacggcgcaggacctgtggcggatgcgccgcatgcccgcgcaagtgcgcgccaaggacacgcgactggccttcaccgacatcatcgtacgccacctctccagcttccaatgcatcttcaagtgcaccaaggtaactgtgtcataactgttggcagggcgacgaaagccaaaagggaagatggctgcgcaccggccccatcctggagctcatggacgtgctggctggaacgatctcctctcgggtgtcgctgggccccacggccaccatctcattcgaccgcgtggacctggtgaagcccgtgttccacggagacctggtgcgcgtggagggcgaggtaatcggccttagcaactcgtccatggccgtgcaggtgagcggctaccgacgcgacgtccccacgggcacgttccaacacacgcacgacgccatcatcacgatggtggccatcaaccgcttcgggcggccgaggaagggtcttccgcagctcttcgacgcggagaaagccgactactgcctcaagatgagggaggtggctcacaagcgcagggagctggccaagagatggatgaaggagcaggacgcggtggacttgatcccctttatcgggagcaacgacttgctcccgggtgagactaaggacgactacgtctccatcagcgacacggagattgaagtgcgcaactggttcctgccccgcaacctcaatattaacgagacggtgtttggaggagacctgctgacctggatggtaagggtgtatgagctgtagttggggggcaacgatgaaggtggtgatttacgtgggtgtgggtttgatgatgataggaccgagctgcgctgtactgcgcccagaacttcaccaaatcggaaaagatggtgaccatcgctatgaaccgcgtgttgttcaagctgccgatttccgtctcggatgttgtgacggcgcgcgcccgcgtcgttaacgttcggtgagtggcgatcagactgttgcattatgggcctttactgtgctaacccacgacgcttttttttgcagtcgctatcgtctggaggtagaggtggaggtgttcgtccactcggtcgtggatggtggagaacgcaagtcgcacagcgggtatggtagttgctttatcatctttctgcacacatgtgtggcctgctgatttgaacttgcaacctcatcacctccatttgtttggattcattgatactttagatactttacggtgctgaacctggacgagaaggatgcgttcaaacagatcgacaaggggttgaagattgacgaggacaaccagcgtgagatgcggatgctcctgaaggcgcagaagcgtctggagttcgccgaggaggacaagaacctgcactcgctcgagactttggagcctcggctgtgattccatgttcagactggaacatccataacaaggcattttgttcagagcgggataatccagcctcgagatactactcacgtacttagtagacgacacgaccagcgcgaacgaggttctgtctgctcaataaccacttcaacttagaagtaccttgctgttgatgcgattctctccttcgaacaagctgagcagtcagactatcggtgtcaacaaagctggaaatttgtagatactattcaagaatttcataattcgcagtggttcagcaagccatgacaatgtaacgggacgcagcaaatttattatcccgtcgtgtacataatagcttacgggtcgtaagttacggcaaaaattcacggaaaagattaggacaatgtcgcattcacacaagttgggctagatcacccgcttcacaggatcacgaacgctacgtatgttgtctccagctcatccatcaaatgacagctgtaacattagtgcaattcgtgcatatttatacaaaacgttaataaagagactgattcactgactggactgcttagcggcgacggtgccggttgaaacgtagccacagcacaccgatgacaagaatctgcagcaccaccgagtagcacgccaggatgatcatgtcctgggtgaagttgacgttctccatgccgtagctcttcagtagatcccacgcctcctccgtattcacttgcgagaagtgctcgtacatgaacgactcgaacgagtacgtgtggaaggcgaggtagtagccccacttccagtagacgggcatgtcggagaacggcaccatgaagccttcacacagcatgaacataccgaagagaccggcgcctagcgcgatgcccataatgtagtggggcacggcagcacccagcaagtgcatcagcgactcggcagcaatcagcgacagcgtcaagttcagcaagaaagtcgggaacgagttgacgttggccaggaacacgacgatagcggacgccaacacggagatgaggagaatacccggcagcgcagccaagaggttggacatcgtgtagcccgtgagcgacaaggcgtacgaccgcatctcgcgctccatgacggcgcggtgttccagcagagcaggcagcgccgcaacggacatgaacaccaggaaagcttgcacgtagaagagcagcggcaccatcgatacgtccttgatgttgttggagctcaggtacatggtaccgaccatgagcgacagcagcacgtacatgagcacacgcagccagaagactcccgggtgtctccagttgttggtcatgttacgcttgacaagcacgaagaactggtccatgggccacggccgcatggccttcagcagttccgggttggtcaggttttcccgacgagctcggtcgcgcacaacgtcggccctgagacgctgcggctcggcactttccttgagcgcccgcgtgaacggctccagcttgaggccttcgtggaagttggtgttgaccaagtggacaaaatactccgcggggttcgtatacatggggcacacgtagcccatggagaagaagtgggcgatggcagcgttcgtggggccgctgtagacgagttcaccgccactgaggatgacgaggttggtcagcatgccgtagatggacgacgacggctggtggatcgtgcacacgacgttcttgcctccttcctggcacaaccgctcaatgtactgcatgacaccgcgagcagaggacgaatccagacccgaagtcggttcatccagcagcaacagagcggggtccgacagcagctccagagcgatacccagacgcttgcgttggcctgacgaaatgcccttgtggaacacgtcacctacacgcgcgttggcgcacgagcgcagtcccatggcgtcgatcacgtcttgaactcgagcctcgcgctgcacgggcggcatgtggccaggcagactcagaccggcaccgatctgaagcgtctccaagaccgtgaacgctcccaggaacgccatatcttccgacacgtagttcatgatgttgtggaacgtgcgcaggtcgcgaggctggccgttcacttcaaccagaccttcgaggtgcacgcccgagcctcccgacggcactcgatcggccagcatatccagcagcgtggtcttaccggcaccggaaggaccgagaatggccgtcagctcaccggggcctgatcgtccccaaacattgttgaggatcttgcgaggctgttggcgctcgaactgcgcctccaacgccgaaggacccgatcctcgcttgctgctcttgctcccgagcttcttctccttgggctgaatgaagtacgaaatgtgctgccaactgatggagcacgtctgcagtgccgcgcgttgggtgaacccctcggtcgagagctccgagttctggtcgaagagcgcgattttgggcttgaccggcaccttgttgttgctgaaggcgtgcggcgccggccccttgactgtgtccaagttactgaaggacgctccgggtgacaggagtccgctgtggtcatggcgcgcgcgactgcggtcgaggtcgttgcgcgacatcggagccccgagcaccgctgtgggctccgatccgtccgagctcatgggcgtgtggctcgaggaatgtccgagcacgggcctgctgtccgagttcatagctgtccgtccgaggcgagttcgagtcgacaatgcagtcgacgaattcaaccgggggctgtctcggagtcggtcttttccgtagtgaactgcctcacatcatcgcttgaggttgaggagctcctatccatttggtaaagaccgcgtcggctgccttgacagggagagtacaagttgcacgacagatgcccggggacagtgcgccgctcccgacacctggaatccaggtcctggatgcagcgtcgcgacgcttgtcgcgcgtagacttggcgctcgggatctcccgagattggcacggtctcagcttgtcgagcgagagggtgctccgttggttgtcttgtttgcccctggtgtcaagttgccccgccctgtcgttacatttgtacaggaacccccgagcagatcaaacgacgatggcgggcgggaggggtagaggcacacgttgaacggtggaccgtactcactcaaactccggcacacatcgactgcctcgagtcgaaggagagctgtgttgccgacgcgaaagtgctttgccatcgtcggaaggcgagccgatggctggaattgcatcgttaaaatcggagaacccccataagataagactgaaaagtttgtggccgtaagtcacgaccgcaatactaagtactggtagggagactgcaagaggggaagagtgcccgtgccaagatggcgctcgcaggtggcaatagcgcgattgaacacctggctccaaaggtgtgcaccttgggtcagtcaccgcatcagctgacctgagcagcgaatactacagtatttgcattccccaactgctccgccaattggcatcactgtcaccattcgtatattacccaggatatagtacttgggactctgttcgtctccaccgagttcttggcggactttgttcgtctccatcgactttgttcgtctccatcgaattcttggtggcattgcgttgctgccgtcctctttagcgtgggcctagccgccattgtttcgtgttacaaatcgagccgagttcaagcctgtgcattcgatgcactgcattcgcacagacttgacttgcttgcattgcaccccgagattcgagccggttgagcaccgcccgcgccacgacttgcatggtgaatctatcgcctgtcggctagagggcgtgagaggtcctggatgataagttttcgttctggtcgacgccgagagtttcgaggggaagagctccacagggagtgcacggctcgtccgcaaagcagcacgcccgccgcacagcgcggcgcactgtccaatgtgatgcattaccatggtacagagatatctcttgcctgtgtcgtttgctgcacttaacctcaggctctgacggggggccacccactcttcgtcccgttgtcgtcccatcaagtgctcggtggagaccgctgctccatcgaagcctctggccgtcgctgttccagttcttggcgtgctgtggacagatacagtagctacggattgaccgcggatcgttcacgtggctctcggttgttcgcgggcggctcggggattcaagccttcttttgctgtaagaccccttcataggtaaagtccgcagttgtcccacacaaattgagcctcaagggatggctctcggttggttcgactttgcaaggtcaatttgacgtttgtgcgggcagattcctgcggtcatcaaagttgatggaaagagggccctcgtacccctaaggataacggaagcagcattcctgttgtattctgagcctacacgcacagtatctctcacgggttgttgctcgccataccaattcgagattggcaaaataccaagaagcctgcggcctctcatgctcaggtacgtcggaacagagcccatgcttttcaccgcacaaatcttcgtgagcagcctcaagtctcgttttggcacacggctcagaccggaggcacgataacatatttatcaaaaatcttaccgacgggaaaagccaaaacttgcggactgccagctttcgcaagttgcgggcaagtgttgtctgggccagtctggccgtggggctacgtaggtccagcttgcttgcgttgaatagtgagggcgcgactcctaattgagagcaaattacacttgtacctgcaccaaccgctcgaagctacatgtgcagtacaccaagtgctgggcctacttcaacgtgaaagtttcaattcttcaggaagatcgccaatagcacttcgtactggtgcagaccctattgtacacgtacgcgctgaggacaattcgagcacacccgtgtagcacaatattatgcggctttattttgcttttatacttcctaggaatcgatcaaaccgcgcggcactaccgatatgttgcgccacgacagtcaggagctatctctgcgcccagcgctcaggcgccgcacacgagacactcgtcctcgtcgtcacctgcccgggccacagtctccgtctggggtgcgggggcgggagtggcggctgcggcagcctcctccttggcacgctgcaggtcgaggccctgcttgtcgaccgtgaacttgatggcgtcggctttcgggcgtccgcgcatgtagtacatgccggtcttgagccccttcttccaggcgtagaagtgcatcgacgtgagcttgctgatggtcgggtcggcgatgtggatattgagcgactggctctggcaaatgtaggcgccgcggtcggccgacaggtccagcacggccttctgtttgatctcccacaccgtcttgtacttctccttgacgtggtccgggatggccttgaccttctgcacggagccgccgtcgttcaggatctggttgcgcacgtcgggcgtccagatgcccagctcgatcagctccttcatcaggtacttgttgacgatcgtgaactcgccggccagcacgcggcggttgtacatgttggacgtgtacggctcgatggactcgttgttgccgaggatctgggccgtcgaggcagtgggcatgggggccaccagcagcgagttgcgcaggccgtgcttgatcacgttctccttcagcgccgcccagttccacaggtccgacgacggggtgacgccccacatgtcgaactggaagatgcccttgctggccggcgagccctggaacgtctcgtacgggccgagctccttggcgatctccatggacgtctccatggctgcatagtagatggtctcgaagatcttcttgttgagctcgcgggcctcctcgctctcgaacgcgaagttcatgaggatgaacgcgtccgcgaggccctggacgccgatgccgatggggcggtgacgcatgttggacttgcgcgcctcggccacggggtagtagttgacgtcgatgaccttgttcaggttgcgcgtgatgaccttggtgacctcgtagagcttctggtagtcgaacacgccctcctccacaaacttgggcagcgccaccgaggccaggttgcacacggccacctcgtcgggggacgtgtactccatcacctcgcagcacaagttgctggagcggatcgtaccgaggttctgctggttcgacttccggttggccgcgtccttgtagagcatgaagggcacgcccgtctcgatctgcgcgtccaggatggcgaaccacagctgctgcgcgttgatcgtcttgcgcgcgcgtccctccttctcgtacttttcataaagggtctcaaactcctcgccccagcactcgtagagcccaggagcttcattggggcagaacagactccacttgccattggcctccaccctcttcatgaacagatcgggcacccacagcgcgtagaacaggtcgcgcgcgcggtgcagctcgttgccgtggttcttgcgcaggtccaggaactcgaacacgtccgcgtgccagggctcaaggtagatggcgaacgagcccttgcgcttgcctccgccctggtccacgtagcgggccgtgtcgttgaacacgcgcagcatggggatgatgccattggacgagccgttcgtgccacggatgtagctattcgtggcgcggatgttgtgcatgctgatgccgatacctccggcccacttagagatgcacgcgcactgcttgagcgtgtcgtagatgccctcaatggagtcgtcctgcatggccaacaggaagcaggacgacagttgtgggcgcggcgtgccggcgttaaacagtgtcggggtcgcgtgcgtgaaaaacttttgcgacatgagctcgtacgtctcgagggcggccttaatgtcgctcttgtggatgcccagcgccacgcgcataatcatctgctgcgggcgctccaccaccttgccgttcacgcggaagaggtagccgcgctcgagcgtcttgaagccaaagtagtcgtactcgaagtcgcggtcgtggatgatggccgagttgagctcgtccttgtgctgcatgacgatctcgtatacgtcatcagcgatgagcggggccgccgcgcccgtcttctcgtggatgttcttgtggaagacctcgatgttgtcgctgaacaccttgttggtgttcttgtgcaggttagagacggcaattcttgccgccagtttagagaaatccgggtgctgcgtgctctgatacgcggcggtctcggccgccagctcgtccagctccgaggtggtgacgcccgggtacacgcccgccacgaccttctgcgagatcttgatggcgtccacgtagtccgggttgagcccgtagcagagcttggtgatgcgcgccgtgatcttgtcgaacttgacgtcctcctggcgcccgtcgcgcttgatgacgtacatgtttaagcgaaggttaacactggcttaaacttggcgcgggcggttagagaattcgctagcttgagcttggcgcggcggatttgggactgacgtcggttggcgggagggccggagtgggctagggatcctgattggaggaaaagatcgacttggtgcaatgtgattggtcggatgcaacccagctcatcccccttgtcggcgcgtgccagcctggttttggcggggggtttgaattaccctccgggccttggcgccaaaactggttgaacccggataaggccggtggccggtggctcgcggccaatgagcggcgccgagctaatcttgcttgccgtagtgactgcaaagatggctggagggtatcgagaagcttgagacatcgctgtgcgcaccgcgcaaaacacctgccaccagtcgtttgaagtgaaagatacgattttcctctggaaaaagcagatggctacattgctctccatttttggtatgtcgctgttagagaatttgaccacatgtgaggtgtttttatcaaagatccatggaatcaattcgttcatgctttggaatcaattatttcatgctttgtgaatcaatcgattctctcataccctgggaggaagaagcatgttgttatgtagtcatgcaagtcaaaggagggcaaaatgcattgcaaaaagctttttcttgctcaactcgacgcacaatttggtcgagctctctcgtaacctaccccatttgaacgtaccactacagcggaaattatttccagagagacaaatggtattatcgattgcatcacaattctaattgcaagccccttttgactatatacgtctggagtgtggagcttacaaaaccctggatcaactacatgaattcgaatcctacattttacgtcgtgctagggaaataatatttaaagtttcagagagtgagcagtatcggtgagagaaaccaacgtggttcaagggtgagctccacagaagaatttcctgcaactctatatcgtagccaaactgttcaataaaaatgcactggcagatgctagtatttttgcaaacaccagcgtttgcttgcgaacacacggatctagtctctggacggcgtgcataaaccaataaaccatggcaagaggattgatcaaagaacacccttcgcctttggacaaatctgtcagtacatattcgaaatcaacacacaaatacgaccctcttctgtgtgcttgcagatgtcatcagttgaactttgggtatcccgctgtccacctcagtcacatttgggagcgatgcgattcacgttgttgacgctgacggtgaaatgtgctagagcaacgcttgcagctcaggctcaagcacgagggacgtacagaggactgcatcctatctcacatgtatagctgtcatagaggctggacagtgtcacattgcaatgctacctcatcttgtgtcttcacgattagttttaaatgcctcgattagtcatgcagggactaaatgaagtatcgctctaccgacaataggcgctctaatttaaattctcaaaaggatgaattggactgatggtatacagcatcctgtacaattatttgcgggtaagtatagaacgttgtgttcctttcgttgccagatgtgggtcatcaccaaaatgaccaccttttcctgccgaacatgtgaaccacgcaacataaactaatccgcaattgacagtaatctcgacaaaggactgcatactgcgccttggagagctaatattcattcatcaatttgaccagcaagcttcatctccatctattaattagaccgacaggattaggacagctgcgttctcctcgccaagcctcgacgtcgagctgcaacccatcaaaccaagctacctgggctacaatcccaacgatattgtcgctctacagtccttgcacttgcaggagcagcatgcaatggaacctaacggggacaatttttgaaaattacgtttttttaaagaatttaacgttaactaaatctgatttaaatcattctaagtaaaagaagctaaaaaaggctcctttgtggaatatgtggtctataagacttgtcaaaaatggttagagtcgatcaaccttagacaagctaaagctgttatatgagaaggatttacttaaactttaaatatcaaggcacctaccttcatcaacattcacaaaatatgcgctaaatattcgcaaggtaggtaccttctttaaacgaagtcagttttttcacaacatttcacaaaatattcacaaaatttagagttatagaaaagtgagttgatcttgagagaagaaatgttaaagtttaataacaacatatcatacgataaaccaacaaccaacaaccaacaatgaacactaactttatccctaacgaagacgttgagatcatctttgatgatgacttcttctcggattcaaaatcggattgtggtgaaagcaacattaacgtattctcggattctgatgaatatctaatgagcgctaaagattacctgtatgaaatcgaatgcaagttgacacagtactgcccgcttcgatcagcgcatggtgatggtttctttattagaataaacctaattaaagagattcattctaacatgactgtagctaagcttcaacataatcaaagatttcaagaagaaatcgctgaagaattagttttaaccactatgcatccttgccgcattcaagatcaaatgaatcggttcgatgatattgagcaatacttcacagcgatgaggtactaaataataaaccaacaactttttttatgtctcctatcagagttaaaaaaatattgatgatttagtgaagctcacgaagttctttcactaaacgcggacatttctcaaaaacaaattcatttttacgaagccagttagtataattagggtcaagggcatgaaccgttttaagttttctgtttttgtacttaccaaaattcataacataatcatcggttagctttgattcaagaaacttaagcatggtatcatttagtaaatttggttggttcttatgccagcggcaataaccaggatcagaaacaaatacttcttcaatggtcttacgtttaaattttcctgaaacttaactcagtcgacatgttggtcttatatactggtataaaatataataaatttaattaattaagcggtggtataatcttcaatctcccctgttaggcggttgtaggtaagctcttgttcgttaataaaaagaactagaagattgacaccttggcagccagcgtttacaccctgaatttgaatagcttgcggcacgtcacgttcggttaggctagacagacacgtcggcgatgagcatgcggttagttagcgaccaagtttggtaatcaagtagaccattcacgagttcgggagttagatcgccattgatagcgccaagcttcgcgacttcattagtggagtgatggaagtcatagtcatgattgagatcaaacgtctgagatgaaccaatgcgaatattaaagtttcgaatccaagatccaggttgaagcgtccatggggcagaatcgaatgggctctggaactgttgaacaccagcagatgcgaagttgttagtttgttcagcgaatggtaaaactacgatatacttagcatttttaaccgaggccgacagctgaagatcaaacgatgcattaagctgagtcgattgcttaccaatgccagcgcgtcgatagaaccactgagcataacaatcattgtagtgaaccttcttaaccggtttagagatgatagcttgagggttttcaaggttgacgaacggtacatatagacgagctgtagtaaaaggcatgtaagtaccatcaatcgtaggctcaagagagttagcaacagcaccccaagcaacactgaagcctgcagaagcggcaagtacaccattcatcggattaccactagcagagcttgcaaccattaccggacaagtattgccggatgatagagtggtcgaagtaagtgacatacccttggtagcatcaacagcgatagcagacgatccctgattcacgcggaagcgaagtcggatctgaggattagccatcaaatctagctcacggaaaatcgggcggagatcagttaatttaatcttgagcatctagttccacgtacccatgatagcgttagcagtagatgcgccagcaacaaaagcaccacgagccgttttattcgagatggtagtagaagcagaagcagcacctactgaaggccaactgctagagaaatcagcgcctgctgtcggaggattcgataatagacgcttaacgaagccgtcattagggatagttgttccaccaggaggagcggaagtactaaatgatgacgagaaagccatagtgttagaatatccatatatttacaataacgcatcagatcgatcggtattgttaatttaaaatattaacgcatcagatcgatcggtattgtaaatttaaaatattgaatattcacctaaactgtacaaaactttaaaccgatcgatctgatgcgtggtgatattgaaaatcctttaattaggtttattctaataaagaaaccatcaccatgcgctgatcgaagcgggcagtactgtgtcaacttgcattcgatttcatacaggtaatctttagcgctcattagatattcatcagaatccgagaatacgttaatgttgctttcaccacaatccgattttgaatccgagaagaagtcatcatcaaagatgatctcaacgtcttcgttagggataaagttagtgttcattgttggttgttggttgttggtttatcgtatgatatgttgttattaaactttaacatttcttctctcaagatcaactcacttttctataactctaaattttgtgaatattttgtgaaatgttgtgaaaaaactgacttcgtttaaagaaggtacctaccttgcgaatatttagcgcatattttgtgaatgttgatgaaggtaggtgccttgatatttaaagtttaagtaaatccttctcatataacagctttagcttgtctacggttgatcgactctaaccattttttgacaagtcttatagaccgcatattccacaaaggagccttttttagcttcttttacttagaatgatttaaatcagatttagttaacgttaaattctttaaaaaaacgtaattttcaaaaattgtccccgttaggttccattgcatgctgctttgcaggaacggttcttttgggactcatcgggtaggaattcgtcacgatgtcagacacccaatggcgtcgcggcggcttccaacctgcgtaccagataccgagaactcgcaccgaactcgctacaaaatagtgaggcgattactggagatcaacccgacagcaagcgcttcgcctacttcttctgttaccagcaacaactacgcatatgcagctctgcagtccatcgaacgcaggctcaattcgggctagttgatgatgactttaagtgtctgtctaggaactacgaaactagtaaatagaagtgccgtacgagaatgtggtcccaaacgtcctataatcctcccaagtcggttgactcatcattcacgtatccaaacaggggcgccaacgagagcgaagnnnnnnnnnnnnnnnnnnnnnnnnnnnnnnnnnnnnnnnnnnnnnnnnnnnnnnnnnnnnnnnnnnnnnnnnnnnnnnnnnnnnnnnnnnnnnnnnnnnntattgttaaatttaaaatattaacgcatcagatcgatcggtattgtaaatttaaaatattgaatattcacctaaactgtacaaaactttaaaccgatcgatctgatgcgtggtgatattgaaaatcctttaattaggtttattctaataaagaaaccatcaccatgcgctgatcgaagcgggcagtactgtgtcaacttgcattcgatttcatacaggtaatctttagcgctcattagatattcatcagaatccgagaatacgttaatgttgctttcaccacaatccgattttgaatccgagaagaagtcatcatcaaagatgatctcaacgtcttcgttagggataaagttagtgttcattgttggttgttggttgttggtttatcgtatgatatgttgttattaaactttaacatttcttctctcaagatcaactcacttttctataactctaaattttgtgaatattttgtgaaatgttgtgaaaaaactgacttcgtttaaagaaggtacctaccttgcgaatatttagcgcatattttgtgaatgttgatgaaggtaggtgccttgatatttaaagtttaagtaaatccttctcatataatagctttagcttgtctacggttgatcgactctaaccattttttgacaagtcttatagaccgcatattccacaaaggagccttttttagcttcttttacttagaatgatttaaatcagatttagttaacgttaaattctttaaaaaaacgtaattttcaaaaattgtccccgttaggttccattgcatgctgctttgcaggaacggttcttttgggactcatcgggtaggaattcgtcacgatgtcagacacccaatggcgtcgcggcggcttccaacctgcgtaccagataccgagaactcgcaccgaactcgctacaaaatagtgaggcgattactggagatcaacccgacagcaagcgcttcgcctacttcttctgttaccagcaacaactacgcatatgcagctctgcagtccatcgaacgcaggctcaattcgggctagttgatgatgactttaagtgtctgtctaggaactacgaaactagtaaatagaagtgccgtacgagaatgtggtcccaaacgtcctataatcctcccaagtcggttgactcatcattcacgtatccaaacaggggcgccaacgagagcgaaggtccaatctacaggaggaattatcgtataaacagaagaacggtgtattttttaaaataaaattcaaactttaggaccttctcttacgggaaagccgtgatcgtccacacaggagaaatcagataatatccatatcatcgctgctggatcatccaaagtttcgcgctttgcttcacacgcacactcacgaaaagctcgcttcttcgttgtttcactttctcagttgagctgctcgctcctactactaaatagtactagaatagtagtagaaccgttgtgttccgatggtcatgctgtctgcaccagcagcactgctttattttctcaagcgtccggtcgtcaagacactgtgcgtgttgagcatagttgatcgacgatagtcctattcgggtattatattcatcttgtaaggtgatgatttcaaaccaccgtcactctgataacctgaatcgagtagcactatacattagtagattttacaatataaaactaaaggtttgtcaaggtaacggggcggggtgttacctcaagtttaccaactggctcacaaaacttaaattcgttatcaacgatcacttcactgttcacgctatttagtcgtagttcgaaaatagtcatgcttctgtactttttcgtgacacactgcacaaccaaatttaccccagaaccttgaaacatcacaaatactgcggattttaacagatcccgttgagccgaagccaatcatggtcttagatttctgaaatattgactgttgacgtcactagaacattgttaaatttcaactttccccctcaaaaatcgtacaccacatttagtcagggtccgactaaatagcgtgtgccaagccgcttgagtcctgtgagtccaattgagaactgattgattgaatgaagctactcctggcatctcctagcagctagactactcatgtagcgccttgaaggcaccgtgtgtacccaaaacaagggttcaaacgaatccagaacgaaactcagatgaagtcaacccttacgccagggaggacaggcgctagtgtcgacagggagcagaaggagttgtcacgtgaacggattgggagaaattttcgagaccgtcgtcacggacgatggtctccgtgtgcgctacgacggcttcgacaaccggttcacatgcttgtggacggcgctgcgtacgtggtcgagacttcgggcaacgccaccacctctgctgctacccaaacagtccgatgcctcgagtctttccccccgttcgagtccatcgtgtccgcgttgaataccttgaaggcggtaccgagctcgttggtcgacgacgaagcgattgactgctcgagcggcgccttgttccagacttcgacgccgatcggaggtgtggactttaccgtgtgcaccgcggggtacgggtttattgcgtacggaggtgatatcacgatggttgtagagtacctggacgccccgctgcgcagcatcagcgcgccggcactgacagatagcagcgcacattgcgccaccgtagcgaaggcaactgcagtcacgccgatcactgcagctttgctaactggggatgcacatgcgtatacatgtcctagcgaggataagtgctagtttaattaaaatgatatgatacatgtacaatggttttcaaaacttggtgtttggttctcgctgcggcgccggagagtcgactgacacatacatgaagaaatttcattcttctcgttgatgtagcattcaatgctgagagcgtgcgcgcagctccctccaaatggcatggcgattgccgagacgagaattagtcagtgcatccagacttgtcacgtggagcttgtgccgaaccgtcgatccgatatgctatcattcccaggctagaggcggtgccgtgcaatcccgcgatcgatgatatcattcgtaataacactgaaagagacatcaacggaacataatggatttctgtcgaggattcgttacaaagttcatgcacacgtacaacctgtaaaggcaattgagcgccgcagtacatgtagtcctgcagctactaaagccagcaagattccagaaagcgtataatgacagttaaatttccgatagtggcgatgactagataataataacaaaatctacccgccaggatatatacccccttagctgcaactctgtaagcgataacaatgttgttgcttgcatgatgcacagcagttatacaccatttcccggtcaagttacaagatttaccaaccaaggtgcaaatgattttttgcgctttgctcactttattggtggtcatgcacaacgccgctagccgcctgagcgagactgtcgcgcttgacacctcgcggcaggcaacaggctgacactgcaaagccttgagcggcacgcgcccgcgtaaggctagtgccgttgcaatgctttgccctgccttcagaccatttttgaggtaaactttttattaaagtctaactcggtaacatgtgtcattggtcgatgagaacagcgtcgtgtatgtaaggatgatgcaagcaaaccactctccgaacgtctgtatagtatgcgtgtgccgcagcagcgcttaacactagcatagatagtggatactggcaacaaccgcgtccaggtagctctaggctgcagccgtggctgcgtgaaatgaatggaagctccatcgcaccgatatattaccggtggaaacgtatcgaaatgatttgtgcggaacttataagcggagtcgagaaggctctccaaatcctgtgatatgattgggcactcttgtatgaggttgtccactacaagcggaggaagtcggtacagcagagatccatgaatccggagaagctgcagtacagaaagtactaatacaaacaatcactgttcataacagactgtgatttgcggtcctcgcgaaccgaatgtcgaccttcagatcaaatacgctggctcactggcggcgcgtaaacgctagagccactttcatttattctaaacacaatgtgtgctcagagcaaatttgtcaacttgttctcgcgatgttaaaatggaaagtgagcttcagactctcagtctactcgagctactgctacgtgcatctaccttctacacctttgccaatccaagttggcagcagtgtaaagcaaaacggtgtgaagtaacttaagtaacatccaaaaatcgggaaataatttctgaaattagtatttagagcaatgtggatttagtgcagagcaaactcaaatcactggtcagtaacagactatctccgccggcaacatgccccaagagccgaagcatgggcttgcggcccgcacgcgtgtgctcgttgcacaccgagaagggcgtgactgggtgctggttgccgactgcaacggcatccctcccactactgcccgcaacatcgtccagcgccaagccgctgatgtcaagaagagaggcggcgcgcgggcggcgtgcacgaagtgtactccagaaatggaggaagctctcgtgggctacctggaagacaactgccagtacacactcgtgcagatgcaggaaatgcttgcgttcgacttcagggtgcacatcagcacttcgttgatcagtaagaagctttgcgataagctttacactgttaagcaggtacgccttcaagttattatgctatcacttttaccatctgtactgtactaagtatgttacctgtgataggttcgcgtagagcccgagacctgcaataatgctgtaaatatcgagaagaggagggtgtttggtgaagcgttgctgaagcatgagcggaacggtgcttttatcgtgtattatgacgagaccaactactactgtacaacctgtactgtaagcggacgcaaggtctgtcgccgctgctattcgtagcgagcccatggagtatggaacttagatgtttgctgtggactaaatccacattggtctgtactaatcctcgaaaaaataaatttttgaaaaaaatatttttcgtatttacgggactctcggctttgggcaaaggtgtagtttcagaaattattttccgatttttgaatgttacttaagttacttcacaccgttttgctttacactgctgccaacttggattggcaaaggtgtagatccctgagaaaactgaacacaggttcccgaaacttcgatgaccaacattcgcttcaacctctgagttgcctttgtgtaggacacacaagctgtgacatggtgcagcagctgttcgtacaacatcaccacggcttcattgctcgacactccccctcaagttgacgtctccatgacactcaacttgcatcttggtcgacggctccactcgaacacaccagacgcgtaaaccgcggggtcggtagcggtttcgtcaagtaatccgcaagctgctgggctgaagatacgtggatcacttcgatggtctccttcgacacatgatcacggacgaaatgagcgcgcaggtcgatgagctttgctctcggtgtgtagccatggttggtcgccatactaatcgccgacttgttgtccacgaagacaggagtcgcaccaactgacttgagccccatttcttccagtagttgccgtagccacacgacttcctgcaccgcgagagccatcgacatgtactccgcttcagcggacgagagcgccaccgtctgctgcaacttgctcttgtaaataaccagtccgccggctacttgaacgatgattcccgatgtagagcgtcgagtcgcaacgtcaccacaattcgcgtcacagaacgctctaacactgcatgtcttcatcttggagcggcgaaacttgatcccactggtgctcgcgcctttcaggtaccgaagaatgcgaattgctgcattccagtgcttctcgcagggctgctccaggtagcgagaaaggacaccaacggcgaccgagatatcggggcgtgtggcatttgccacatacaaaagcgagccgatgagttcgcgaaatggcttcactccagcgatgactggtccgtcttcaacatgcagatcttggtcgagtactgtcgggttgcgcggggtaagcgtcatcctgccgaaacttttcaaccatccgctcaataaactgcttctgtcccagccaaagctcccccttttccttgtcatacttcacctccattccgaacacgtagcgaacatctccgagggccttcacggtgaaatgctgcccaagttcccggcgaacatcttcggcgtcctcctcatgcaggcagccaacaagcaagtcgtctacgtacagaacgacgaaaactggcgcgcgtccaccttgcttcacaaagagacaagggtcagcggcacgctgggtgaagccggccttgcgaaagacgtcccgaatagtacggtaccacactgcagcagcctgtttcaatccgtagaggcttcgacgtagttggcaaaccaaatccgcagcaaccttcattccggcaggcactgtcatgtagaccttctcgctaagatctccattcagaaatgccgtttcgatatcgtactgcttcacgtagtagttcaagctgcagcacacagcaagaaacgtgcggaccgtgttcatactcgcgaccggggagtaggtgtcggtgcagtcaacgccgaacgtctggaggcatccaagagcaacaagcctcgccttgaaccggacaatagcaccattttcatcacgtttgattgcgaatacccacttgtggccgatcactttggcaccaggcggcttccgtacgaggtcccacgtgtggttacgaaagtgcgctcgtagttcagctcggatggccttcttccactgctcgtgctccggggactcaaccgcctcacgataattacgaggaagctcaactgcagcaagagcgatctcgtagccatcatcaacacgctgtcgcttggagtccggctccagttcatcactagacgaagtctcggcgttgtcgacctcagttgtggcagggccattctcgagtagggcaggcgcatttacgtcagtgctgtaccggctggtgtaccattagtgtccgatgcgggcagcgtagcttgcgacggttgtagcgactcgatattcgggagaatgcgggggagatggtccatccttgccatccgtggtcgcgacccgccagtgaacactacccgccagtgaacactagctgctcccatctctcgacaatgggatgatgctagaagtcgaagacgcccttggagctgcgaggagcgacctcacctgtgttgcgggggccgattccagtggctgatgaagtctctcgctgccggtaccactgcgtggcgcgatctcggcgggctgcacaggcacgagactctcatcacgtctagcttggtctacctccatgtcctccgagtcgccactgaccacctgcgcgtcacttgatccatccatgggaacatccgtatcaccactaggggctggtgaaggagttggtggaagaccaccagtgtcctcagcatcaacattaggccagtgcgcgccgcagagtccgccacttgcttgcatgggcagattgtagtgagttgcaggggggttctcgtcaagttgaagcgtccgcgatgttaccacacgttctgcctccaggtcccagacgcggtaagccttggcggtgtcggagtacccgaggaaaatgcagcgatgggcctttgcgtctcacttcgacctcttcactttctcgacgtggacgaaaccgcgcgaaccaaacacacgcaggtgggatagatccggccgcttgccgtagaaaacctcgaacggcgaaaccgatgtcctcgcagtgttcggcagccgattgattgtgtagacggcagcgtttacagcttcaccccaccactccaggtcaagtcccatgtagtgcaccatggacctggccatctcgacgatcgttctgttcattctttcagcgaggccattctgttgcgggctgtagggtgcactcgtttgctggacgataccatacgaactgcagaagctgcggaaccgcttgttgatgtactccgtgccgttgtcactgcgtaggcacttcacgcgcgccccagtctgcatttcgacgaggttcttgaactccacaaaacacgtgaacacttgagtcttcgacggcagcaggaatacatgcacgtaccgcgaaaaatcatcaatgaaggtaacgatataccgagcgccgccttttgacgcctgttgcattggtcccatcacgtccgagtgaatcaattccagcacttccgttgtcttcacagaacttcctgatcggtgtgggaacgcgctcacagccagcttccccatcgcacatcctgcgcaaacatcattcttgtccggagttagcgttcaccaccggcactccgtccactgcacgcgccacgcttggcatacgcgacgcaccgatgtgtccaagccgagcgtgccacagctgtgcgtccacgcacccagtcgatgctgcagcaacctccttgacagcttcttctcccccagacacacactgtgcaggccatgggaagagctttccttccttgtgcacgcgcgcgaccagtcttcccccgaggcgaatgtcacagtgtcgattttggaataaaacctcggcgcccttggcaaccagtgcagcaatggagagtagcttgcggtccagttgcggcacgaagagcacatccgtcagcttcaccatttgggaaccaccaatcgaaaaacgcaccgagccgactccacgcacctgcagttgctggccattagccacggtcaccgtcatcatcgagtccagtgcccgatactcacaaaactcatcacggtcaaagctcatgtgtgagcttgccccgctatccaggagccagcatgcagatcagtcgttaccgctgacggagaacacaaactccccagtattgcctccaccactgctatccgcctgagggcagtcagcttgcttgtgcccgacttgattacactcaaagcagcgcccattgaaacccttgttgttgcgctcccgaccacgtgactggtggcgttgctggccatgctgctggccatgctgctggccacgctgctggccatgactgcttcctcgacgatcacgagcatcttgattccgcccaccactgggacgtcgaccatcatcttgacctcgattgttgcgcggtccatgcgcgaccgccttgaacacctcttcttgtctctcccgcttcttgatcgtctcgtactcgcaccgtagcatctccttcgcgtcgagcagcgttaccgatccgtgtgcctcgataatcttgatcattccatcgtactcggcgggcaggctccccagtagaatcaccaacttctcgccctccgtgatcgtttcacccactgcagagagccgcaggcacaagtcctcaaaacgcatgaggtggtccatcaaattctcacccggtgccatctcgaagccgtgtagctccttccgcagctgaacttgattgtgcagattcttctgcacgaagaacgtccgcagtgtctcccatgcctctcgcgcggacttggcttctctcaccatggcttggtagttagggctgagcagctggaccaggatcccgagcgccttcatgtcagaggcttcccattcagcgtgcgtggctccatcgcgttctctgacttgacttggacatggctcaggagattcttgcgtgccaacgccatccgggcgttaaactcccacaggaagtagttgtcgtcttgtagcacgtcgttagggccgagcgtctttgggctcataaccaaacacaatgtgtgctcagagcaaatttgtcaacttgttctcgcgatgttaaaatggaaagtgagcttcagactctcagtctactcaagctactgctacgtgcatctaccttgagacgacggcaaacaaaatgttacttatcaacctaagtacgaatcgcgatttaggcgcataattggaaagagcccctcccgagcttctggtatgaagaaacgaccgagaacgagaccgtcaaaaaatatatgtccgacttcaaccccgaaagggaaattttttttttttgatgaactggtgtaaaattagtcagcgaatccgacaatgttgtccgttttagctaattcgaagcctaacagtgttagaatctcacttttgtgccgtaacttcaaatcaccaggggtatatttttgaatttgttttagaaaatttgatatctggatgtaagtaatattttgaatgaactgtggacataagtatcataatgatcgactacaaccttgggctgcctattcttgctcagcaggcagatccgcagtagctttgtgcttcttgttcttttgcgtcttctttgctgcagtagccctcttctttgctgggttatttttcgtcgcaacagcctccgtgataccacgctggtcttggttagccttagccgccacggccattgccgcgcgatgctcacgtcgtgcttgtttccgtgacttggcatcttctccttcctgctcgctaggcttggcgtagaggggatcgctctgaaattcagcaggaacgtagggcttgatgttgtggtacatctgcgcaattttctcggtgttgcggacaggaggggacagcgtctcgatatggtccgtcatcatccgctgcaccttctccttcgtggtgaagatcccgtcaaatcgacggctcaaactaatctctacaagttcgctctcggggcctttcttgcagacaacgacgcccggctgcgatgcgtccatcgtgaaaatctggaacttctggatgccgtcaagtcgtttgtacaattcggtgagaataggtttgtaggacttgaacgctgagctcccgcgaggcagatgcaccgtgattgagctcttggacgccgaactaacagcctctacgagatggtccatcgtccaacaatccactttggccacgtgcttgcggatgtggccgaaaccacggtcacaggagttcttcgtgtgccttttgacaaagaacttgtagtccacgtgctgtagagctcccatgtgtacttgcgccaatagaaacttgatcacgtagttgtttttgttctgccctgagcagttgtcggcgtacacggtcagccgagtcttccccgccggtatgatcttggtgctgatgaaatgagccagcatggagttaatctggtcgctccctttaccgctcgaagtctcgtcgtacagatagttggtttggattccttcgttctcgtaaaagatgccgaagcagctcacagagaccagcgagcaaaagtaccactgcgagggggtgtttgacacgctcggaagtgtcaagttctggggaaaatccatcacgatgacagcgtggttgacatcggtagaagtcttgtccgtcttgtactccggcctgtcagccatcaaacaaaatgttactaacatccaggtaaatctgccgagtaaatcaaaatgctacttatgtccgtatacaaaacttaccgcattcgacgcgcagattctgtgtgccaccccagcgcctccgtcgtgtcactggttacgccgccgcgcattccagcgtggtaaatggagcagacgtcgcacacgttactacgtggcgactgaattcggatggttggacagtaaagcgtcaaaagcttcctcattgtcgaccgagctggttcacggacgcgcaagcccccgcaacaaacttgtgcctttcgtcgtagatggtatcccaggtaaagtgcgctggtagtaacgtgtacatctcgctgctgtagtatttctgcgtagttccgtctttcttcttctgcatccgcactcaaaccggcacaacctcgccgtcctcctcggcaaacgactggaaccatttcaccagccaaacaacgttcacttgaggtgcatgcgtgttgagccggttaccatgcgccttgatcgacatgttaccgtctcggatgcgcatcttgcagcgctgcaaggtaatggggactactccatagcagagcgcgaaagtcggtcggcacacatgacctacgtaggggaggatgtacggaaacttctcacggtcaccccgtcctctcttacgctcaaccgtgggggtctgcatcaacacagccaggagcgtgtacaagctcgtggtgtgctcttgcttcgtcatctggtccagcgagcacagcaagaactccaactcacgagccttgcccttgacgcactcgttctcacacgcgtccgcgtgaatcacctcagtcacacgggctcgaggactcgcgtcattcaaatgatactaacatcctcttcatcttcggcttcactgctcgcgctctctgctgtgagcggttcctcgtcgtcgctaggcgacgcctccgaatcaggcgtaaagtcgtcgtcgctgctgtcctcgttcacctcactctcactggtagcagtgggatcgacaccacagacataatcgtcggcagaatcaggctcttcgtctgcttcgcgacgccgagcagcaaggggtgccgtggccaacagagtcagtgccgtggagggggacgttgtggccggcggagtcagcgcctgggagggcgatgtcgtggctggcggacccgacgtcgcggctggcggactcggagccgtggctggcgggcttggcgccgaggtggccggtggcgaggctgagagaggcagcgctggaggttgcgcaggctgcgcagttggcgctgcagcgcgcgaggtcggtgctgtcggcgtcgtgggtggtgtctgcatggctgtaggtagtggtccgagtggcttttcgaaatggtatccgtccccttcaaatttttgaaaatcaaaactcctcgttttctcacgacttcgtttagttacgattttgaacctggcctcttttaaggcgattatctcgatatctctaaattttgttgccgttgtctcccttctagatccctgagaaaactgatcacaggttcccgaaacttcgatgaccaacattcgcttcaacctccgagttgcctttgtgtaggacacacaagctgtaacatggtgcagcagctgttcgtacaacatcaccacggctttatcaaaacgctgcacgcagttttcggccttgcctccgtgctaacgtgcacattggcagtccaagcatcgctcgataccccggtcaccgcagcccaagacaatgctcacgctatactgagtgatccgattggcaacatccacacaccaagagagttgaaggcttcggttggcatgaaggcggcagccaagtgttcgtgcatgatcacgccgcgcccttgagtcttctttcacggtctcggcggcaaaaatgaggaggcggaattgcaggattcgcccaagaagaccagcggcaagatggggaacatcaacggtcatgcgccgtgctgctcgaccgtcaagtacgcgattctcaacacgatcgactacggctggacgaacgagacgctgcagaacaagttctgcgaccacagtctgtcgatgagcccctccagcgacctggcgtcgcgcacaatcaaagacatcattgtgctgacgcactcgatgggcggcctcacgatggccggagctctggccaacggacgatgcagctttggcgataacgccttgtgggtgagcatgagcgccccgatgatggggagtatggccggagactacagccaggacctctgcaatggtgacggcacggccaatatagtcccagacttgctggagctcatcggagagtgccccatatccctcgttcgcaagtcgatttcgtaccagaacgagaagtacagtactccggagctaaacgcggcgtacgttgctgctcaagaggcttaccgagggaacgtgagtgccgccatgtgcagcaaaaactaccatggcgtcgtctcgcagtaccagatccagagtgtgctcggaggagaggtgatcccgcacaagtcgccgcagaatgacagactcgtcgagttccagagctgcctgggagggctttcggagggcttatttggcaacagctaccttgaccggttctactcgccgaagctaaatcacgcagacacggcgtttttgacgcatgatggagtcttcaaggacaaacagaagccatttagctggttggagtgtttattcgggatcgaaaactgagcggtacttcctagtaataaaccaaacacctgaagtgcggtgcagtctgatgtaatgctgttcttcctcaccttgttctttgtaagtagtacacatacaaataccgatgactcgagccactcgactcgaatcgagtgccgctttgggtacaaaaatgacgaatataatgccgtacttagtatttacataatggtagtaatgaaagaacgaaggtggcagtattttatgaaacctttctctttgtggaccgtaatacaagccgcgctttcgcggagttgcaaacatttttttgtggcatgttatcaacttggtaaatttccagcacagagcgacattttcccagcaaacttgttagaaaggagcagcctcgtccagcctcttgatgaaattgtactcattgaaaggcacctgggccttgccaaagtccgccgtactgagcgtcgctcgagcagcatcagtcatttgatcccagatgattaagctttgaggactccccactttttccagagtgcagtcgatgtgggggaaagtgtcgagagttcgaatcaaattcggcgtgaatccgttgatgaagcattcagcaggagctggagctttaccgatatattcgctgttgccgcctgacgctgcgattcccagcagcaacgacgtctccacttccgggttgtcgatccacaggatgacacttgcctggtcatggcgccgagatgccaaccccgcgaagaattcgggaagtagaaggcgaacatgatggcgtaccgattgttgtgtcatgtagccctcccgtatacttgggagcccgtcggggggtctgtgcacgccgaagaccccttcgacccctttagcccacccgtgatatatccggcagcatcaaccgcagggtagggcatacaccctccgtcaaagaagatgctcggtttgaacttggctccgaccttctccgaaattgtcaccggttcaggttgagggaacggcactactgcatcgtggttgacttctttagcgtcgatcaccaggagggatgtactgcaactgttaatagagctcggtaattcatcggttttaacgcgggtgggtgggtggcttgagcgtggcgagaggaattcggcaatgggctccgcttccaatgccaatgcttcagtacacataaaacaactccaggaggcaagtctttcccacttcgtcaaacctgcgacagtagacacgttaactgtatgcaatggcgacagatcaatgcgcttctgttatgattaatgggtcaacactgatcgcgaatctgctgctgccgccgttgttgagtatatcgcgcagattctagtaccggtagcgagcaagatggttatcgggttccaacccgatagtgttgatgattaatcgagaaactcgctctttcggcgctattccttcggaatacaagtttatagtcccgaaagagcaaaaatttgcgtccccaaaccaaggaatattgtacagaagctcgccataaatgtcagaaccatagttgaagttgttatgtcgcccgaatgttgaagttgcaatgtcgcgcaacattatgttgctcgattggcgcgtacgtcagcatggatgcgaccaagggtggtcatatagaagtgtgggcccctactggttggcaagccatggcatcgccatgctgcatgtcgtgcgcctagggcctcgaggatcaaagtcattttcatatccgaccgccatgctgtacttcttgacgctaacccagcgctgcaacttggcctgcacgtactgcgggtcgtccgaggagctggacatcgaggacttgatcgaccctctcgactgcaagtacaaggtggacgctctggacaagctcacgacccccctcaagaacgaacaggagcccttcgctatctgcttctatggcggcgagccgctgctgcagctgcgccagatcaagaaggtgctagcccagcacgagggcagtaacaccaaattcgtgctgcagaccaacggcaccaagctcaaccgcacgcccactgcggtggtgaacaagatggacacgatcttgatctcagtggatggaggtgagaaggtcacggacaccaaccgtggggcggggacttggcgccaagccatcgacaacggatacctgatccgcaagaatggcttcaagggcgatttgatcgcccggatgacggtgagccacgtgagcggcgacatctaccaggatgtcaaggacctattcgatctcggcatcttcgaccacgtgcactggcagctggacgcgcagtggagcacccccatgtacgcggggtatgaagaccgcggcggcttcctccattggcgcgacgaagtgtacaatccgtcgatcaccaagctggccacgtacttccgtggcaccctcctgaacgagaagaagctgctggggattgcccccttcctgccgctgttgcatacgctcattacgggcgagaaggcgacgctgcggtgcggatcgggtcgtgacgcgttcaacgtgcgaactggagggggcatctcggcctgccccatcgctccggacagcgacctgcagtacgatctggcccacatcagcgacgcagacttcaccccggagaaggtgcgcgactcggtcaagatcggaggcttgtgcttgagctgcgatgcgaaggacatctgtggcgggcggtgcctgtacgcgaacaagacgatgtggtggggcgaggaaggcttcctcgccgtgtgccagaccgtcaagcacctgatccagtgcatgcgcgatatccagtcggacgtggagagcgccatcgcgcagggtatcatcgagttggaggatctccagtatccgaagtacaacaactcggtggaggtgatcccgtaaaggactcagcctccgtgcatgaagtccatcctacttggtgctgtgctgggttaaagatatataatgaagcgagaaaaccacttcttatcattgcgtagtttcttttttattgttcaggtagaaatgcatctacgaacacgtgccgatacccactgctagccctctctgcgtgccaccaagcctatcgactcgactcgatgggctaacgactcgatttcgtgccagaaatgcgctgagagctagttttacgtagctgagaagatgagtgaccggcagcagtcctggttggcaaaagatgaatacagctggaagatacttgcctacaacgtcggggccgatcggctgagcattttttttaacggttgccaggctgctcgatcgtcggtccgccctacggaggctatccaagacaaaaaaattgtgggcgacttcaacatggcttcgttttgcatgaatgcctgcttgtggagaagctgccgtctgagctccaggtggccaaaaaaggaattgctcagaattttgctgtcagtggctggttatgatccctgtgagctccttgaaacattctgctcgacggaggttgcctaaagcaacctccgtcgctaacttgacaattgcgttgctgccttggtgtttgcaacgtctgtttctgcttagtaatgaggcacagtgccccctccagcctccgagccgccattaggatcgcgatccgaaagcgatggccaggaaacttccgtcttattccagcagaagtgatcccaccgcggcgagtcaccgaccgctcagctcaaccagctcaacgagatgccagcaaatcaagtctgtccaagtcctcctaggagcagccatcgggcactgctcaaagggctgcccgacgggcagccctttgagcatatttttgcgccctggaccatgtcgcggccgttccccgccgctggctccttccggcccaataattgcgcggtgcgcgcttgcaattatttattgcctctgcggctggagagcttcacagccagccagccagcggcaaccagcggcggcaccacgacaagaccgcaggccaagtcgtcgacgaagcggcgaccgacggcatcgtcacttctgcaggatgcgccgtcatcgagcttcgaatccgtacttgattcggtatcctagtttcatgctccatcgaagttccactgccagcttgatctctatacacctctcaaacagccttcgaccatagtctccgtatcatgcccttacagagtacgacctgcgcttgcaagccggcggttttcatcattagcccattcctaaaaccaccaccagcatcaacaggaagaaaccccgagccatctccagccatgaagcgtcggccgctgcgcgccgccggcggcttcgggctctacgcgctgtgcatctgcctgtccaccatcgcgctgcaatctctgaccgcgccgtcgcccgcgccgtcctctaccacctccttcctcagcgtgcactcgctcctctggacgcagccgccgccgctctcggccgccgacttgcggctgcgcaacctgtcggtgcaccgcgtgcgctacgtggatgacgcagacgcagcagcaatggccgaagagcaacaggagcaggagaaggcggccacgggcgtccgcaaggcgctgaccgacttcctgaccgcgagaccgcgcgtcaacgaagtgtccagcgtcgtggtcacgtgggaggaccacccgctcgcagctcacgcacgggacaaggacgcgcggctggaggaagagcaggaggaggaggaggaagaagacgcagcagtggaggccgccccctccgagtcgtactcgtacgaggtgcagatttgggtcaccgggtgggggttggacgcactctggaacccagccaacaggagagtgaccacaagggacccgttcctcgtactggtggacttgccgcgggagcatgagatgggcttccgagtcaggatgaaggccaagcagaccaagcggtcgctgctcggcttcctgctgccaatgggattcttctccaccgagacagacggaccctggagcgagagcgcgatgctgtccccgacgagggatgacgagcttgaagctattgttacgtccttggcgagtaacaagccgctgctgctgctattggcgctgtgtatcggctcgagctgccttgtggtggcgcagctgtatttcagacggagactggcggtcgctcgacagcgcaagctgctcaaaatgcagtcgagtcggcggtcgtcatcggagaaggactttgccgccaaggacgggagcgctgcgagtgaggcgacggacagcagcagtgaggacggcggcaagtcggtgcaggagctggagcacgagatccgcgacctccgccaggagctggcggactcggaggacgaggtgcggcagctcatgctgctcagcggctacggcatcgagacgctggcgccgcacgagctggagcagctggagcgcgagctcaagcacacgctcaagcgcatccaccacctcaagaagcacggagcggcagcggctgcaccggaaccggagatgagcaagacgacccgtcaatcgcacgtggccgagcagcgggagaggagaaggcacaagcagcgagacgccctcccgatgagccccatctacgagcaccggtcgttttgacaccgccgtgccatttttatttatctttatgaacctgcgctctgctgcaagcagcgggctgcaacacaacaacctagggaccccctaccactgagggtgtactgccagataaacttcaaagagagaccctcgacgtgtagccatgtcaattgaatgcgtccaccaggaccttttgtcacttaaattgaggcgacatcccaacgacatcttccatgagggtccttcacacccatgtaagcactcgcctcaagtgtcctgcttgctgcttggtgtccacgatgtcatcacgacgtcgacgtcacattcggtgtggcgcacaccatcgacgtggtccgcacgatttcagtagtcaaaccaaccgccggaacttcaccagcagctccgttagcgatgccaatgcgcgacgtggctctgggcgcgctgtcgggcgcgttgctgtccgtgttcgtctctcaggtggtgctccctcgcctccgcactcgccagctgcgcgcgcaggcctccaatggcaccgtgtacctcgtgggcgccggtccgggcgacccggagctgctgacgctcaaggcgcgtcggctgctggccagcgcgacggtcgtggtggtggacgacctcgtggggcccgaagtgtacgcgctgatccccaaggactgcgagatcatctacgtggggaagcgcgggggcaagaaggactcggccaagcaggtggacatcgacgccatcctggtgagcaagtgtcggctcggccacattgtcgtccgcctcaagggaggggaccccatggtcttcggccgcgtgcactcggagatccgggcgctggtacgggcgcagtgcaagttcgaggtggtgccgggcatctcgtcggcgttggcggtgcccgccacggccaacatcccggtgacgcacaagacgctgagcaccaacttcgtggtcatctcgggccacaaaccggcggagatggactttgaaacgctggccaaggttgagacgatcgtgctgctgatggctacgaggacgatcgggagtatctgtgagagtttggtcgagagcgggaaagacaaggacacccccgtggcgctgattcactcgggcacgaacccggaccaggtgctgctgctgggcacgttagaggacattgccgccaagacggaggggaagaagtactcgccggcgattatcgttatcggccaggtggccaagtacggagacctgaaggcgtaccttgatgaatcggacgatgaaccggtcaacacggacgtgtgaagaggttaagaaaaaaataaagcggcaagattgagctgggaaatatgaacatgcttcgaagatattactctcactggggtccaaacatggggcgtacagcatcagcactatttaccctgtgtgcagcttagcggcgcacgatgtccagcagctcgacctcgaacaccaggtcggcatcaggggggatgacgccaccagcgccggccttgccgtagcccttggtcgacgggatgttgagcgtcgccttcatacccttgctcatgcgcatgacgccctcatcccagccgcgtatgacctggccgacgtcgatctggaactggaacggctggccgcggtcgcgcgacgagtcgaacaccttgccgtccgcagcgagcttgccagtgtagtgcatgaccatggtgtctccgcggttggggaacgtgacgttgtcgccctcctcgatcacctcgggcaggacaaggcgctcctccacgtgcagctcggagtgcagctcgtggtccaccacctccagcgtcacattcagcgactggccggcgtacgggtgcgccaggtcgatgtccatggtgtcctcagtcagcttgacaataacggcacgctcaccgcccgccagctccagcacctgtccaacggcgagcatctcgcgctccttctcgggcaggttcatctccttgagcggcaccgacaggatctgcttctcggcgccgaaagcctgggccggttcgatctccaccgtcttggactcgcccttggccatgccctgcacggcgtcctccacgccggggagcacctggccgctgcccacgatgaacttgagcggggcgccctccttggtcgtgggtagggactcgccgcccgacagcgtgccctccatgtgcagcgacacgcggtcgcctacggccaccacgcggccaccaccctgcgtgctgaaggcggcagcagtgctgggatacagcgacggaaacgcaacgctctgcaggccacgaggggcagcagccatgggacgcgcctgcgtcagcgccagcaacgaacgggactggcgacgagctgcggagattggcacaattgtgtagcgttagctatgggaaataaagaggagcagcagcaggaggacgcaccgatggaacgcgcgttctggcgggccgcgcgggccacgagggtcgggaagcgcttggggagcatcgtggtggacttggctccgctaatgattttgtgtggcgcttgtgtgcggagacctgtgtgtgtgacacacatcaggactgaaagttcaagtgtcaaaacacggtggtatggtgcttcattcattgatggacgttatcatgtggaagttcacgacgcagcagactgtttagcgaggggatacatgtaaagcaatacccacgaacacggagaggtcgcatcgtacgcacttgtttctcttgtccgatcctgcggccctggatggatttacggcgtggctcgcggtctgcaagtactgtacttgctcgaatagataggtgcgacgaggcagttcctgcccacggcactcgctgcacttgcacgccttctcacaacagagtataggctcatctaaatctcaaagcggtgcgctgccgagagctggtcatgcgggactgcagtgctatagaaatcttgcgccgtcatggtttttgtgtctgtggtcgtggctgtctggttcgagagtccgtggaccgggatctcgtcctccaagattaactgctgcagcgagtcatgagacacggctccaggagctgccgggcctgcgctgttcacagcgtcgtaagttgcagccgccaccgcgctatctgccttgccctcctcgcccaagtccagcggaagactcatcaaggagccagcatcgttaagcgacgcaagctgctgctcgaacgagtccatggagttcaatttctggttgccgtcaacaagctgctgctcgaagataccttcgccattcacggacaaactgctgagacgtctcgtcaggcctccgttgatccatgagtcgtcgggctccacatctgctgtaattgagcgaagactagcactcttcgtatctccaaggctcaacattttgttcagcatacggtgaggaggacgtcccatcgggtttgccgtcggcttggccaccgtcgagtcttccgtaacagatcgggccagaggctgaactcctgattgtgactccattctcagaatcgcagcatcaatatcatctccaagatcgcgcaggctcgtgccggaaagcaggctcttgaagctcccattgccaagcgagttgttcgagtgtccacgcaagaattcgttcagtatcatgacgtcctcctcgctcattcgctcgtccgtctcgtcctcaagaggggacagaattggctccaaattcacctgggtcgtgctaatgacattgttgctgactggcagtggctggtgtggcatttccatcttcacaggatgtgcgggagcaacgtacggcatcttcggtctgacaggtgacgtcgaaactggcggagcgtcatccgtattcaacagtcgcgggcggccaagctttgtgtacgtcttctggttcggattcagagccttccatctgagtttgactgcgtcctccgtgcgaccctgcaatccacaacatcgccgattaataagacttgtactggcacgttaagcccgagctttgaccacctactggcagaagctcagcaatctgcgtccaacggttgccgtacttctcgtacgcctgctggatcgcttcgtcctcctcctctgtaaacggcctgtcgtcagttgaatagtcttcttagtcaaagttcctcaccacaccgtaaaataacgccgactataaatcacttacgatttgttaatgctcgggtccaagcggttccgccagcgctcacggcactgcttcgccctggagaaaaccaatcacacgtcagtgagtcttcgcacacgcaataaaaaatcgtgaagtcacgtacgttcgccccgggatgttgttggacacctggcgccagttgtcgtagcccttgagcatcatctccatgagcagcgcgtcctcctccaccgaccacgggcccttgaccagcccgggcttcagcaccttgttccagcgctgcagacactgcgcattgtcgcggccgggcacacgctccgccaccgcctacagcaacagccacgttcgtcagatacagcaacttaaggcgcctccagcttataagagcacgagtgacacaccatccagttgcggtggcccagctcggccaccgccttcttgagcgcctcgtcctgctcgggcgtccagcgcttgctgacgacgccgccgctcttcttcttctgggcctcccccgcctggtccgcgagcggctcggcgcccacggcgtcgcgtccgcgcttcctgcacgcagaacacaccaacacgtcaccctcctgaccatcactctgactttgttcttgctgacggtgcgtacactgctgactcggccactataaaaacatgggcgagacgattattaatcagttagttattagtgaaggataatggctggatccgtctttacgccaatcagcgctggagctgcagctgagggcgctacttacccatggtgaagtgaagatcaaaggtcctcgcgagctgtaggggtgtctgttgcgtctgttgcgtccgagttgctgtgctgctgccgccgcctgcgctgcttcctcgcgggcttctcgacgcctgcggggacttggactgaagagtgagactcgacgggcgatgggctgggggcaccagttctgcggaaagacagtgtacccacgtgtgattggcgcaaaaagaggcacctgagttctcatctcattcgacgatattggatgcaaatgcctggattggctgaaagacaggtgggtacattcatgtgttacacacaaagcgcatgtcttccgggtggcaggcaacatggcatcctctgaggagaacaaacaaacatgcagtgagccctcccacctcctgctggtcatcgtatggcacatgtaactcagccgtaataactcaaacatgcagccagacaacaggcttgccccttgttgcagcaatttggtgcgcttgactcaagacacagtttcctttgtcggctgcaacctgaaagtgtgtagccgtcgcacaggattctttcgcgttgctcactgcaaagctccggccaacctctgaacgccgattgatttatttctccaacaacacgaatctaccgcctgctccgaattagcagcggcgcgctctccattctcttggcttgtgtcctgtgtcgtcctactcagcttataaaatgaaaataaagacgtcgacggcccccacttcattcgcacgagccgcacaagcacttggtccgccctcgcttcaagttactgcttcaccagcgtcaacaccgtgcagtatgctcgctgcttactaatacatcttgcccttccgaatcgggcgcatgagatccgagtccagcaggtcgtcaatgtcgttcgagatgttgcccagctcgtacgaaattccgttcgagttccgtcgcggctgggagcgcacctgctcaaagtcgagcgagtgcgtcaagttgcggctgctgctggtctcgaagttgtgctgtgagtacgcgttcgggtccaccggcaagctggcaatgcggtcctcctcctggatcacagcatcgccaccagtcggcttctgtgcacgccaactatcaattagtccctggaacaggtgcttgtcctcgtgatccaggttttgtactgccttctgcaatgtctctgggttcttgaacgagctggttaaactgtccatcatgctgctcgtgctagacagccgacccctctcgcctctgtccttggatattgagaccgtcgcgcggaacatttcatccagctcgccacttgcaagaagatcttctggtgacatgtccgtgaatgagctcaagccccgcgcactgccaaagctcagcaaactgtttgagtgactgcgaagcagctccttgagaattgcagcgtcgttcatctcatcctccgccttcacttcatcgctcagcggctccacaatgggctcagggtactggttcggcattggtacatgtgtcgtgggcaatggctcgtcagggtgaggcattgccatttgcggagggtgaagaggcggcatcggcattggggtgattggtgtgctgttgggttggtacggcatcggggcaggatacgcattactgtacgtcggcatctcgggcatcgtaataggaccattcatcagcgtcgctgcgacgtcatcaggagtcggaggtgctgtcgaccgctgcttgttcactgtcataccgggcatgagcttcggacgacccggtttcgcccttaccttctggttcgggttgagcgccttccatcgcaacttcaccgcgtcttccgtgcggccgggtagcaactctgcgatctgcgtccatcggtttcccatcttttcgaacccttcctggataatcgtgtcttcttccggcgtgaaagggctttaacaagagcaacaacatcgaattcgtcattatttgcctcctccagcagcagaaaagatcttctgccctcaacaataaacgtacgatttgttgatgctcgggtccaggtggtttctccatcgttcacggcactgcttcgctctacagcattcaccaaataaaacagcaccagccacaattgtcaacataatcccccccttgcacctccaacctccacatccaatgccgcgtacgttctgccagggatgtgcgcggccacttctccccacgagtggcagccctgcagcaccatctgctcgagcgtgctgtcctcctcgaaggaccagtggcccttgaccagcccgggcttgagcaccttgttccagcgctgcagacactgcgcgtggttgcggccgtccacgcgcgaggcgatggccttccagttgcgctggccgaactcctccacggccttgcgcagcgcgtcgtcctggtcgggcgtccagcgcttgcccttctcgtcctcgcgcggcttctgcgcgtcgctcggcacctcgtggaacgatcgcagcgcgtcgtccgccgcctcgcgctcgcgcttgctgcgcgcatgcaaacagacacacagagccacatacatccacccacacaacactcagccgccggttgttgcagttccagagcggacgaaaggacctacactcctggttccgctgcgcaaatgcaacaccaaacaggtcaaacaaagcataacgttagcgctggagcttccttcaccggacgccacaggcgctggccgcgcgtacccattgtgtgttgtatgtagagagctgtctgtctgtctgtccgctgggtacgaggctcgagcggcccctgttcgtggcggcagacggagtgcgagtgaggaggggggaagctcgcgccgccttcttcgaggtgcgcgctaactcgctgtgtgccgaattatggccccccagatgccgagaaaaaaagtcgtttcggccaatcgcggctcgctcaggacccggaggcgcgaacttcaaggtcgcgggtgcagagggcgcgcgacagtgtatacactttggcaaagtacgaagtctttgccggtgctgtcgtgcacttgcgagcaatccaagacgcgggattgaagttgcccgcgccgaccagatctgcgcgcgggatgatgtattagacatgtcgagcgcccgcagggcgaagctcatgcggcttgagcatcgtggtgagatgcagggtctgtctgtgcatgttcattcgttcgtgtgggtcctggcgaggggaggtttcgacgatggatcgtgctgtacagtgtacatgtatgttacgaaagttcagtttgccccaagcaccaaacgtcaagagattgacgcttggtgcttgggcaaaccagacttaagtcggttgagctatgagcaaaggtgcagagtgtcacgagctgtggcacgactcacgatagctcgccaactgtggtcgctgcttctgttgccgagttaactgcggcaggttgtccacgtagcagagcttcccgatccgcttggtcctcctgatgcggaccaaggcaactcattgacgggcatcctgtactgtagccggcgcttctgaggacgccgggcgtcgcggaccgcgaggcctccaattggcgggggcaacttcagagacctgtgcataacctgtgtgcgtcagacatggttccttgcgtgaccgagtagcgcgagaccgctggccgacggaggaccaataaccccctctttgccatgccgtccagcgccatcccccgggcggcggacaccgcgtccaagaatgtcgtgcagactgtcgacggccagaagatcgtgcgcgtgtgcgacgcccggctggcctacggcgacgtcgtgggcgacgagagtttgagtgggcggctgatgagcgcgggacccattctggagctgatcgaccgctttgcgggcgctctcgccgagaagtacgaagtcgagttgatatttggtgcggtatgcttttcatttagttttttttctgctgattgcagtgtgactgtggaccaaggcatcgctacagtctccattgatcgagtcgacatcaagagcccaatcgctcacggagacctgctccagttggaaggagaggtcatccacactggtcggtcttcgatggtcattcaggtgggtatcgacaagttcttttgcagcagtgcatttcccatctaacccttctgcatgccgttagatgagcggctaccgctacgacctggtccacgccaagttcattgaggtgctcgacgcgttcgcaacgttcgtggcaatcgactacaagactctgcggcctcgacctggtttgccccagctcgtgcatccgacggatccgacttacgtgtcgagacacgaggcactcgcgaaccagcgcaaggaactcgctgcacgctggcgcgaaatgcagcagcaagtagacgagttgcctcacgtttcagcggacatgatccagagttttggatccgatcactcggagctcgttcctgtgcgggacacggtgctgaagatccagacgaccttcctgcccaagaatctgaacggcaacaacaccgttttcggtggtgacgtgctcgcattcatggtaaagtatggattgtgatcgtctgtcattgaatgactgctgcttctgacggcattggtgctttgtgttgtaggataaagtggccttgcaatgcgcgagaggcttcacaagaaacaggaacatgacgacggtgtccatgaacaggatatcgttcaggttgccgatccacatcaatgacattgccactatggtggcgcgtgtttgcagcgttcggtgagtagggacacagcgaatgcgttgatggagcggcaaaacctgacagtgatgttgtgcttgaagcgagtaccatttggaagtcgaggtcgaggtgtttatctcgcacgttcgcacgaaagctctttgtaggtcccacaccgggtgcgtaatcttcgtttagttttatcaagatccctcacgctgttgcttatcaggatatattaatatcgttactgctgtctacagatactttaccgtggtgaatctcgatctactgcattgcaaaatgcgcatccagagaggacttctggtggacgagtcggaccaaggcagcatgcgaaccatgctcaaggctcaataccgctatgctttcgacaaagccgaggaaaaattgcatccgctggatcaggcaccggttggatcgactacgccgatatacgtggcgcctgcactacacagtcacctttagagatgcccacggctaggtaacgctgtaagatggcttggtggcaacaatttctgggtgaaactatccgcgataatgtatcgcatgatggtgcgttggaaacaagcatctgaagagaggctgcttgtcaataaaaaagaatcacttttttataaatgactgccgcaaaattgaagagaacttatacccggtgtgagactttcggcgttcttgagatgcaaactacttaaggaaaacctccaaatgctctctgtaagcaagaaaagcgccaccaagcgtgatgagtctctttacctgaaaggaagtctttagcataataccatttcactgcagatagacttaccgggtgtcgcaaacctgtgctaccacaatcacaacgcagcaatggaaaccgcatccaggaagttgcgcagcagtgcaacgctctgtcgttgcgcttaaagaggatgaccagttcctcactgttcctccggacaaacgcattgccgttggaggattccaatcttcataatcactgcataatcacccgaacatcatccttaaggatatcacaactggacccgcttacatgtaatacaaagtaaaaggccaatgattgctgctcttcctgtactacagtagcgtacggttcggtagtaagaatgaccgtacggttcggtcactcttagtaagaatgaccgaaccgtacggtagtaagaatgaccgtacggttcggtcactcttagtaagaatgaccgaaccgtacgctactgtagtacaggaagagcagcaatcattggaatttcttaccgacagtgctcattcactgcatcgacaaccatttcttcttttccaccggcgagcaactccagctcctctaattaaaacatgaggcgagcttggatgggattagtgacccttctcgccttggtggcagctacttctatgacttcccaagatctcgcacgaccttctttaccgatcgcaatcccccatcgacagcaagaagcctccagcgacgtcttcccttcgttgaaaatccacgttaagatcaagcggaagaagacaaatttccacggacaatccgagttcgacgtattcgcgagccccgtcgtgttgaccgatgccaccagccttcggtatgattgctacaccaccatcgtcgaaggtgatacgcagctcacgtactcgctggtgggtggcgctagctacctggtgaccaagaaagacggcgccaacactgaaacagttcagtgccttccgtcaggagcgctgtccttcgacttggtcttgccggcgctgaacgatgtggtgccgattcccagcgctttgataggcaacgccagtgtcgactgcgcgagtgacaacctgttcaagacctcgtatcatgacgcgattttcgccgtctgcgcttcgggttcgtccgggttcaccgcgacgggcctcgacttgacacttgacgtggagtacctgcagaatcccgtcagcatttcggtgccaaagctcaccgatgggtcaccaccgtgtgatagtgtagcaatgcccacaaaagtggcgccgacaacacgcgcgatactcactggcagctcacttcccacggctacatcgaggcgcttgaaagcatctgctcccatggctattgaggccaaatcgtgtacgtgtaagtccatacctcgtccctgcgtcttcttgcatggtctgggtacctcgaatgaaagagcggagctgcaagatactccaaagttgacccaggagaagttcggtaacatcggagaccacgctccgtgctgcaccagtgtcaagtacgcagtcattaataccgtcgacgctgggtggaggaatgacacactgcagcagaagttctgtgacttctcgctctccatgagcgagtctagcgacgtggccacggggaccattgcggatactatcgtggtgacgcactcgatgggcggcctcgtgatggcggcagctctcgcgaaaggcaagtttaaattcgcggaaagcacgtcgtgggtcagtctgagcgctccgatgatgggaagtatggccggagacttcatacgagacctgtgcgacggtgaattcacgaaaattgtcgccggggtgctggatctaatcggccaatgccccgcgtccacggcgaaaaagtcgatcatttaccagaacgagaagtacagcaccccggaaatcaacgcggcgtacactgcagcccaggaagcctaccgcgggaatgtgacagccgcgatctgcagtacgagctaccacggcgtcttgtccaagttcacgccgtcctgcctagttggaggcaagctgatcccgcacaagtcgaaacaaaacgacgcgctcgtggagttccagagcggcttgggcggcctcgacccgaatctgtttggcgacagctacctcgaccgcttttacgcatccaagctgaatcacgccgacacggcatctctgacgcacgatggattcttcagagactcgcaaaagcccttcaagtggttcgagtgtctgctctagcgtatcaccaccgagtatcggtacagtaattttaagcgtggtgagcagaaatataaagatatcgctttgcccacggttaataacttctccagaatcgtaagatactcattctttctgccaaagtccaccgattgtcttctacgattctttagtttctgctcccttcactcggtcctccacacatccaagtggaattttcttctccaaatacggaaagacccactttgcgctcacagccagcagcatcaccagccagccgatgagcaccagtgtgtctctggggaatgcctccagcagcatctcctccaccacaatgtcgaacacacactcgtcaaccttcagcttcgagtcgggtcgtcggactccctccacatttgcaataagtgaaaattccacttcaatggccgcccccgagggctcgagacggtaccgcaccgacttgtgcgtctccatctccctcgggtggagccgaagcttggccgtgttcaatacccgacgtcgagctggcatgatcttgcttttcttgacatttcccgcaatatttgcagtactaacgtcaaatttatcttcactcaccacaggcagcggcagcaggacctgctccacctgcagcgagaagagcgacggctgcgtcgctgggtacgacactttgatgtcgtaaactttgtcaggttcgagatccaacacgcggtacagctgcggctcgccgtacagtacgcgctgggactgcagcggcgactccggacgcagctcgacgacggaagcagcgtgtggggacggcgaaggggacgccgtcatcgccaggaagaacaaggtggcgagcagcggcagcaacatagcgttacagatgcgaatttctaagtgggtttgttgttacaggtactgtttctaactgatatcaatttctaatgcataccatcaaaatcccaattttgggattttcaagtattgcagtagcaaactcctgtctatctcaggtgaagtgccaatatcctgcagcagacactcgaacggacggcgtgaacttggacaagacgccgtggtagctcgtactgcagatcgcggctgtcacattcccgcggtaggcttcctgggctgcagtgtacgccgcgttgatttccggggtgctgtacttctcgttctggtaaatgatcgactttttcgccgtggacgcggggcattggccgattagatccagcaccccggcgacaattttcgtgaattcaccgtcgcacaggtctcgtatgaagtctccggccatacttcccatcatcggagcgctcagactgacccacgacgtgctttcggcgaatttacacttgcctttcgcgagagctgccgccatcacgaggccgcccatcgagtgcgtcaccacgatagtatccgcaatggtccccgtggccacgtcgctagactcgctcatggagagcgagaagtcacagaacttctgctgcagtgtgtcattcctccacccagcgtcgacggtattaatgactgcgtacttgacactggtgcagcacggagcgtggtctccgatgataccgaacttctcctgggtcaactttggagtatcttgcagctccgctctttcattcgaggtacccagaccatgcaagaagacgcagggacgaggtattgacttacacgtacacgatttggcctcaatagccatgggagcagatgctttcaagcgcctcgatgtagccgtgggaagtgagctgccagtgagtatcgcgcgtgttgtcggcgccacttttgtgggcattgctacactatcacacggtggtgacccatcggtgagctttggcaccgaaatgctgacgggattctgcaggtactccacgtcaagtgtcaagtcgaggcccgtcgcggtgaacccggacgaacccgaagcgcagacggcgaaaatcgcgtcatgatacgaggtcttgaacaggttgtcactcgcgcagtcgacactggcgttgcctatcaaagcgctgggaatcggcaccacatcgttcagcgccggcaagaccgagtcgagcgacagcgctctgtcgcgagtcgctttgtcggaccggtttggggccgatcgccgctgtgagtaagtgctgcctgtgcttataggtttatggggcacaaatagcaaggagatcactaagcaaaatgcaataagtgttccatacgacctgtgtggtccttttaaacaaaattcacgactgaccttccttctactcctaactttcctctcaaagccacccaacatgccatccgtccccgaagtcccgccacgacactgcgaggcacatcatccctccaagatacctctgggtagcggcccacgggtctccaccttcgagacaacccggcccacggcccactacttctcgcccgcggccacagcaggtggacgacctcaggcactcatcgtcgcccacgcagagttggaacggtccgagccgttccgactcgggacatcctccccgactgcatctcggcgtcctcgccgagcgcacgcagcttgatccacttctctccttacttgccaggccctccgttcggcctgcaatccacttcgcgtccacacctacactctcggcgcattgcccccgccgtccatcctccaaaatgcctcacttagacgctctgcctgctcttgctcctcaagagccgcgcaccacgcagcgtagccctccgtggccatagtcagcggcgaacgctcgcccaccgacgcctcgtactacctccacaacttactggttatgcataccagcgcaacccaaacattcaccaccagcaaccagtagttagtcactattgcatgctcgccctcctcggaggcgaaccagcaatcaaagaccacgactacagcgaacacgccggccacgccctggcagatccactcgacgacttcgtaggtgaacagcacggcgtagaacgccgagaacaggatcagggacgtcagcgtccataccaccttggcgacaagcttggcacgggcgaccgaacggccagactccagactcgcgcccgtgcagtacttggagcaagccttccgtcccgacgcccaagtctcaggcaagaagacgcaccaccactcgtggagggcgtcaagccacttgtagagcaacctccccagcccgtcttcatgctcgcccttggattccagcacaaccaacggggtggccagcagggcctcgtaacacttccacacgcgagttcggagcggctgcatttgcacggcaggcccacggacatacctgcagtagcgcatgacgcataacttggccagcacgctccacctcagggcgaagtcgacgaacgcagcggcgatccgtgagccgatgcttcgcagggggcccgtaaccgtccacgacactgctccagcagtgagccacgccagctcccagcgacgctccgctgcaacttgacaagctgcctcagcagcgaccaccactattgccgccaggccgttcaccacgtccgtcgcccactccatcgttccagcagcactaattcataatgacggccacttcgacgccgtccgagccgtccggaccccactagcggcagcccttggcggtcaccatcgacctgcagaggcgcagggcagccaaggccccgttactgccagttggtcaccagcgtcgctcgcgggttcttcgaaagtgaccagccagttgggcgtctctctcagacggtcacagccacccacaaggtgagtcacatttcgtcaattcacttgaagtcacgtggtaatcagaagttgccgtagccgccccactgaaagttgcctcattccgcaattttcgccgggccgcgcactccgcagtcaccaagaatctctccgctctctcccaggcctcgcctcgcctcgcgtccgtcatggtcaagaagaccaactccgacgtcaccgacttcgataaccaggtgggcagcctggacatggccctcgagctcgacgacgagggggacgtcttcatcgcgcagcgcgagttttgggcgcgcctccggacccgtctctccgtcaacaatgcgtcccaggggctagacgtcctggacgccatggccatggacgtcctgtcgggtggcgacgcacgccgcctgaaccagatcctcgtgatcctgccgcaccccgaccagatgcaggccggcgagcctgccgagcactccgtcctgtcgatcccgctgccgccgttggtgcccacgccagagtcgacgtcaccgccaccgcgtccatcgacagggaccagatcgtcgccacggacgtcttccaagacgagaccgccatcgtagaagaaacagaaggccgcggccaagaagaaggccgaggcctacgacttccggttgccgacgacggcgcccgcgcgactgaagatcgacctggccgcacttgcgcagcgcgccttcagcaagggcatcgctccgttccgcttggcgtacccctggcgcaaacagcggtgctggtacccgccatccgagtatcccgagttgcacctcgtgccaacatgcgcttccgcgagctgtttttcctgtgggcgctgtacgcgccttgtctgaatgccgaccagcggcgcaaggagaaaatgaatgcgtgtcgagcgcggaacgagctcattagctacaacatcgaggagcgagggtacttcggctttctcgacgacttcgagaacggtgctcatgacacgctcatgtggttgggaggcagaacggccaagcactctgccggcgcggctaagagcaagggcgcggcgcacgaggacctcggcgttgtcttcgcaaaggacaagattctctacgagcgggccatcgagcgagctctcgaccccaagatcgtcgacgaacacggctacgcctcgattctggagctcctcgaggaggcggagctcatcgaccccacgcaagcgccacacctgcgagtctccgacaaggccctcgctcgcatcaagctcgacgtcaccagcgggccaccccccgtgggcaaccgaacccgcggcccgtggaaggccctctcgtcggacgcgtcgctcaaagataccatcgaggaggtggtcgagctactggacttgggcatgaaggtggccgtgtacgaccagaagcccttcaaccccgacgagcagggcgacgatgactcggacttcgaggacgaggacggagccttcacggcgttgcctccgacgcccccccgtgcagtaccgggctcccgccgtcaaacactccgtccaagccaggatttccggtttctcgctccagcaagtcaggcgagtccgaagactccagcgacgacaagaagaagccggcggccaaggacgacagcgacaaggacgacaaggcccaacccaagaccaccaaggcccccgtcgcggccatagagacgctgccgggcgacgaagcagacgacgacggcgaggtagcgagcgagcctccgaccaagaagctcaagtcgcattccgcaagcgtcgacaaggccaagtgagtcatgcgcacacctcggatctccatttatcttcttcatttgttgtagtcgagtctagtgcagccgcagcactaattttgcaggtaaaaccaaataaaaacatgaacttgacatgcatatccaccattcttgagctgctcgtaaatccatatccacaatcacaggttcttcagctcaagaacatcatcaactacgccagcagcaactagtcatcatcgacttgggcgttagcgtccgccaaacgcgcacttcgactaagctccggcaaccccttcttcctcctatccgcttgctcaaaagtggtcaccaacgacgcatactcgggcatcaaagcctccctgggcagccagaacacctcatacgagctggtcatcgtcaggtacttcacgccctgaccgtccttcatcttcgccactattccacgatgggggcttccacgcccacaataacagtgtcctcatttcctagtgtcaaccgttccgcgtagctcgacgcagggaggtcggcctcttccaacggcctctcttcttcgttttcatcactagtgcccagaccctcgggcacttcatccatataaggccgggtccacttgccacgataccttttgagcctattcacgttcacggtcaccgttttgttagggtgagtcgggatgtcgacccgataagcgttctcgccgaccttggctacgatccgatagggaccgtgccaagcgaaggcaagcttcttcgtgcgcacttcgccgcgtttcgccctgaacacctggtagacccacaccgggtctcctatttcataattcacttcgacttgcccttccgggcgctgctcgtgccgatcttgcgccttcaacaactgacgctcaaccaaatgtcgcgaggaacggagagctgtacagctctcgcctatactgagccacttcattactccgccacttcttgccaagattgaggaaggccacgtccgtcggaagcactgggtcgcgcccgtacagcgagaaaaacggcgaatctcccagggcctcgtggtaggccgtcctgtaggcaaaaagcactctaggaaggtaaatatcctaatcatcttgagcctcactcacatgcattcgtagcattcctatgagcgttccgttgaatctctcgacgagtccttgagtctgagggtggtaggcagcaccaaagagtttcttaatgcccaacatctgatagaaggacttggccacctcaaaggtgaagttcgagccgttgtcgctcagcaaccgcgacggcactccgtgccgagacaccactccgttcaccatcacctccacgaacgtcatggagtccaagcgctccacggcgaacgcctcggcccggcgagtgaagtaatcaacgaaaactaaaatatagcgattgccacgctcggtttcgggcagaggccccacggcgtccaccacgagcaacgagaacggccccgtcagatccacgatgggcatcctctgcattcgaccagcgcgccacggacgcgcacccttgccacttccgcacttatcacattcgcgcaaatactcctccacgtcctgtcgccaccctggccagtacgcgtgtcgcctcaccttctcgagcgtcttcgtgaggccgaggtgcgacgacagtagatcagcgtgacaaaaatgtaagactgtttcaacgaacggaagcggtatcacgggcacggtcagcgatcgagcgggaccgacgcgcgcgcggagattcactctgcgcatcaacagctcgttctcgacggcgaacttggacgcgatcctcacaaccttcactcgtaagctagggtccagcggcagcgttccacccgtcaggaacgcgatcagggccatcacccacgggatcttccgctgctccaccttcaactgctccatatcgagtccgaacaagtccacggacgacggagggacgtccgtcggcgaggaatcgtcctcagtagcgtcttccggcaacggaaccgcggtctccgtgcccatctcgccgccgccgtctctagtcatcggttcgggcgccacgttggacggctctccgactgagtcgttggccacggtctcgggcgagtcgtccggattcagcaagtcggccatgcccacaggcgagccccccgggttcaggaggcccgccatggtcagcgcgttcacactcgcggtagggaggcgcgacaagccgtccacgtgccccatgctcgtcccgggttgtgatgcactcggaattgtagattggatagctcgatcgcccagcgagcgagcttagcattggtcgtgcggttgccaggactgaagacacaggtaagcgcctgatggttaatgtagagatcaaactctcgcttatctaggtagcagcggaacttccgcgtagaccagacaatgtcccagcattcaatttcagagattccgtcttggttgttgatccagttcttctgagagcctgtcagtaacttgctagcataggcgacagcacggtctcgaccgtccaccacctgcattagacaagcaccgacagcatacctcgacgagtcgacgtaaagcttgaatcgtttcttcatgtccgggtagactaggataggaggagtgactagcgcccttttcagctggcggaacgccacctcacagtcctcgttccagacgaacggagtgtctttcattttcaggcgttccagcggcgtagagatcagagcgtaccccgggatataccggcggaagtagctcgtcagccccaaaaatgaacggatatcatgcacatcgcgcggcctctgcacgttcatgacggccttcaccttctcggggttcgggaggatgcccatgggtgtcacaatgtgcccgagaaaggtgacctgactcctgccccagtggcatttcttcatcttcagtttgaagccggcctgttgaaagcgggtcagcacttgccgaaggcgaacgaggtgcgacgggaagtcctcgctgaagatgacgcagtcgtccaagtacaccaagcacacgcgcctcttgaggtcgacaagcacggtctccatcaactgttcgaaagcaggtacaacattgcataggccaaagggcatgactaaccattcgaatagaccgtatttgcatgtgaaagccggtttagcaatactgtctgcatgcatgggcacgttccagtagcctgaggcgatgtccatggtcgagaacagtttggctccactcagcacgtccatgatgtcgtcaatcagcggcataggatagcaatctttgaccgttacggcgttcaacttccgataatcgatgcagaaacggatgtccccgtcgggcttcctgatcatcaacacggagctggcccaggggctgttcgagggccggacgaagcccagcttctggtactgctggatctccgcctccatcacctcgccctcggcgaacgacacgtggtagggctgctgcttgatcggcttgctgtccccaatatcaatctggaacttcagcaagtcggtcctgccgggcgagttgggcgactccacgaacatgtctcggaagcgctccagctcgctgcggaacagcgacttctgctcatccgacagcctcgactgggagaagtcggcctcgagcgccacctccttgtcgggcggcacatcgggcctcgacgccctcacagtcttgccgagatccggcccctttgcctcttcttcacgactggcagcaacggtggccgccccgctagtctcgggcggacggcaggcgcctcttcggacttctccgccgacggctgctcaaagccgaacgccgactcgggcaccacggacgtcgaggccaccaccgtgcccttcttgatccagaactcttctgtcgatgcgttgcagacctccacgacgactcgaccgtcgtccacagtacagagcgttctcgccacgcaaagcgaaggcggcaagttgagagagccctcgacgaggacggtcgcgttcggggcatcgcccaccacatccgtgaccaccagggcctggccccttggcggcaagcggacggacacggccatcgtggccatgaacgattcgtggaccaccatcacgcccaacgataagacttcgcccgtgctcttcagcatgagcgtccgctcagccacgtcaatcactgctccgaacgcgcccagcgcgtcggcgcccaagatagcgtccacatgcaacttgtcggcctcgagcatccgcatggtcaccccgaccttgcccagcattagggggagagtgatccacccccgaatgcgcagacggtgtccagacgaactgcgtacatgcccgtcgtaggcctccagagcttcaccagctcggcccagacgcttcagaacacggaagtcgacgagactgagcgttgcgcccgtgtccgccaacatctgcgaaggcaggcagtcgatgtacccgcacgacagcgcctcgaagttccccacagtgcacaccacacgccgaccaccggcaactacgcgtgggagctcggctccacactcatcatcgtcctcatcggcacggacgccgaagccgtccggcaagttcacggttaccacctccaccatcccggtcttccgtccacgctccggcggtggacgctcgggacggaccacttgcacgtagtgcgtcgcgtcgtcgtcttcttcaggacggagctccccgtccagcgcctcggccgaatcgcggtacaacgccgtgaagtcaaagcatacgggccgccgcaagcgacgccgcagccgacgcttcgcactcgccgagtgggcttctcgaactcgatctagtagcttattccaaatatacgtagcgttctcattgtagtactcgttcgtccattccttcacaggttctcgccagtcgatttggtcttcattttcaccagcaacttgctcaacatcgtgcacgaggcgcacccagtctagatcaggtggcttatcatgaatcggggggatctcgaccgtgccgccttctctgagctggtcgacgaccgacttcttcgcacgcaacatctcgtccttggtctccttcagcaagaagtacacggccttgcgagcctccgacctctcgctcggagaagcgctcgaactcggttcaggagcgtccacgggcggattcacgcttaccgcagtgaccatctcctcgcagttctctcacagacatccacggggaccgcaatgttcgcagtcacgctctcctccatcacggagccatcgaccgagacggtcgaggccttcgggcccaggtcggactccgacaggccgaacgactcatacgttgtctcctcggtcgagcgttctagagagacgcagctgaccagtgactgtttgaagtcacggttggctcgcttggcctccgccgagttctccagtgtgttcctgtaccagtcctcccagtactcgggcgaggacgtgccctcgagcgaggcatccttcatcttggtcagcgcctcggccgggacgcccagaaacttcgacatctcttccatggacgggcccttggccctctccgcattctccttcaccttgcgcatcaactccacttcgtcgagggggtggagcctgtcctccagctccttgtcatactcctcgagctcctcactgatgcctggaacggagggtttcggcgcctcgcactccatggcgtctagctcctcgtccgtgaagagacgagcgtggcgggcggctccttaacgtcctcggccgcctcgaccacctcggaactctcgggcacttccttgctctcggcggcagcgcctcggtcctcctcggcgacagccaactcggtggcgggccctgccaccggctcgggccctacgactacgttgacgttctcctcggcgatgtgcttgccggccggcgatcctccgtcgtcgttccactcggcgaacagtgtgtcccccacatctacagcgccgccccacccttcgaaggagggctcctccaccatccaacgcggacgggggccttccttcttcaggatgcttcgcaaaggggccgcagtcactgacctcggcaccgctctcaactccgtcggcggcacctcctccgtgggcaccttgtagggtatgttcgcgctcggaggcgcagcacagaacgcttcatcgtccgcactggccgcatagaacacatcaccgtcgacttcctcctcctcggagtacgccgactcctccgacctcacggaccggtcctcgtcgtacgccgagtcgacggtctcagccgccgtcccctcttcgttgcctactccacgctcggggctgcggtctgggccactcgcggggtcttcatcgccggcggggcgtccagcttggccgcctcggcctccttagtctcttcatcgttaccatcgagggcggccccatcatgggcccacgccccgttcacccttgcactcggctcgtcctgctcggcgctctccttggtcgccgtcttccccgcagggtacatctactcctcctcgtcactcgcaacggcccacgccgcttcttcttcgtagcagtatgcaggctcttccgccacgctttcctcattttcgccgtgcacagacaactccgtccagcactcagctccaccttcttcccgcacggacaacaccgtccgcccctgctctcgttcatattcttcttcgacggagacgccgctgggtacaatccactcttcccgggccccggcaaccgtctcaacttccacttccgctcttggcgcctctacgcgttcctcttcgacgctcccttcattcacactactcttcacaaccttgtccaccgttttcctcgccgtgaccgcagaacgccttcgtctcgcctgcctcctacgatcaccccctgagccatcctctagactagagaaaggagtctccttcctcccgcccccgtcactgtcgaggggtcggattgctctgggcggccgcgttcagcaaactcggagtcgcatcacgaagctcggccaacacggggcactgcatcacggagtggctcgcgtcttggcagaaaacacaaccagacggagcttgtaccccccgcggctgcagtttccctccaccgttctggggcctgtcacactcgaccgcgatatgaccaaacgcgccacagcgcctgcagctcatcgacgcgcgcttgcatgtagcgcgaccatgtcccatgacgttacagcgaccacacacaggccaaccgtcctgcgtgcgactatcatcgcccatccgaatgccccggaatggctgagcgttccctggcccacgaccgtttccagcgggctgagtggcaggggtggcggccactaccggcgctcgattgcgaggcgacctaggcggctgccactggcgctgcataagttgctgttgccactgttgttgctgctccatgaacgacttcatctgctcagcgagggcctcgaccgcagtcgtcgcgggggcctcctccgacttcttttcttcttcttggactcgctgtccgagaactcgtcctccgcctcgatcggacggtgcatgtccttgaacatgagccactcgcacgcctccggaatgtccgacgcgggactcgcgtccaaggtcgccagcatgcgcttgttccgcattcctcggcggaagagctggtaccgcatctgcggattcgggtagtcgagagactcgcacaggtccgagactcggtcaccccactcctccacggactctccgcgctgcctcttcgtgttctctagcagctcccacagcttgtcagccgtccggctgaggcgctggttatgggaccgcaccttgagcgccctgaacgacatgatcctcgagttgttccaccaccggtcagcctcgcggcctcgcagcttctgacggaacaccagcaatctggaccggtcggggaaaccgtccgtgtggtcctcgaagagctcccagaagtcccgcgccttctccaccgtggccgtgtccgaatggaacatcggcagcaccttcacggcgtgcgagaccatcgtagacaggttgtaggcactcggcgaaagtccactggcaccgagccaactcgtcgacggtgcagccgtcggagccggcggagccgtacccgttccaggcgtccgacttgccgtagggtccgttgtaggttgcatgggcattccgccaccgagcggcttcgagagcccagccggaccgccggcgaactgcaacttcttcatcggagggggcgacttggtcggcgacttcaccgcgcttccgctcccactccatcctccatactcggggccttccccgaaccatgttgagcgctccagctccatccaaaggcagggcgatccgttcggcgggcctcgggacccgtgtagcgtgtgatgaacccactccggcctcgctgcgtcgggaccggctcctccatcgcgtcgtggtagtcttcctcgtcgtcggcgtacatcccgtagccgtacccatagtccgtcggctgagcgtagggctgccccacactcgaccgtcccatcggactcgagaccggtggctccggctcgcccttcacggcgggctccgacttggcctccgccacggtctccgtcttcattccagccgaggtcaccggctggactccagtcgcggtctccgtcttgaccgcctccttctcttcatagtcgtcgtcttcttcatcttctcggagctcacgcatcacatccgacacggacgctccctcttcagcatactcagcggtcttcctccaccgctccagactcctcaatccctcttcaaccgggcccggtgcgcccgctccagcctggctgggtggcggcggggccctcggtcgctgggacagcggcggcgctatcccgatcatcggcgtcccggaagccggtgtcgagggcctctgccgacgtctttcggcacgctcagcttctgctcgagcggcacgctctgattcggcccgcgcggcacgctctgcctcggcgcgctctgcacgcgctctttcttcttgttcagcccggcggcgtgctgcttcctcagcgttaccgcctcttcctcattgtcctcctggcatcttctcttctcagtttaccgttccttgtccactctcagtttaccgttccttgttcacttgacctcttgctcttgaccgtgcacacttggctcttgtgtctacgttaccgttcccttgtcctaccggcctggatcgctcctctcactgctcctcgacgccgcttttcccgcgcggcgtgtactcgtgtgcggactcctgggtccttccctggcacactttaaacacgaggaggggggtcacacgtccagtcaccaggtccagacgctcggctcttgactttgttcacttccgggcacaggctctcagcacttttcactccacagtcgggaacactaccctgcttctccaccacgtgtcgcgagtcgctttgtcggaccggtttggggccggccgccgctgtattggagtagtaagtgctgcctgtgcttataggtttatggggaacaaatagcaaggagatcactaagcaaaatgcaataagtgttccatacgacctgtgtggtccttttaaacaaaattcacgactgaccttccttctactcctaactttcctctcaaagccacccaacatgccatccgtccccgaagtcccgccacgacactgcgaggcacatcatccctccaagatacctctgggtagcggcccacgggtctccaccttcgagacaacccggcccacggcccactacttctcgcccgcggccacagcaggtggacgacctcaggcactcatcgtcgcccacgcagagttggaacggtccgagccgttccgactcgggacagctcccgaagggagacactgaactgattcagtgtcagcggcgtttttattggtcgctaggtagcttgcaccaccgacgagcgagtacgtgaacttggtgccatcttcgacgaacgtggtgtagccgtcgtagcgcagactggtgccatcggtcaacacggcagggctcgcgaatacgtcgaactcggattgtccgtggaagtttgcatctttccgcttgatcttaacgtggattttcaacgaagggaagaagttcttggagagacttcttgttgtcgacggggagttgcaagaggtaaagaaggtcgtgcgagatcttgagaagtcacagaagtagctgccaccaaggcgagaagggtcactaatcccgtccaagctcgcctcatgttttaattagaggagctgaagttgctcgatgctgaaaaaaaaagaaatgattgtcgatgcagtggatgagcactgtcggcaaaaatgtacggtactacaggaagagcagtaatcaattcgcccttcatttcgctttatccagatccattcgcactctccttacatgtacatgtatgcgtgctgtactgtattgccgttggagatttctacctgcatacatacaagctgtatgagcatcacgacagaacagcatgcttgcaaattgcatagccagttgctttctgcataatttgcatacgatcgataaccggttactataaatgcagctattggggggaatgtcgtgatcttcacgtcaatgcggtcgaagctcgccatgtactcgtgcactacatatgagaccgcgtcaaacaaaatgatgcccatttgttgaccaatcggttttcgtacctaccctaaccgaacataaaaaattgaaagtgaaaatcacgcttagaagcggaaagtacttcaattcgatttttggttttagcacgataataaatgtgcagcaccgaaaagttgaagaaatattgtgcccctaataaaatctggactttcgggggtccggaagtggagatagttttttcagactggtgtcgcttttcgagttctcaacgtgttcagtacatgtcgctcaaaagaagcacaagacagggtcttgcgatttacgcggttaaatcgcgattcgtatacttaggttcgtgagcataattttgtgtgacgcggtctcatatagtactgcagtttttttctgggatagcagtaaccccggagggagtgctgtggccagcccaacacagattaattaggcggcacctcggtagctgaagccggtaatactgaagccggaaaactggccccggtaactgaagttaactgattgtctatgctctccatctcaaatccgagacaagctcgagatggatggaagacagctcgaaagcgacggaccagtccacacacacatcaagtgatgcaaattcaactacatgtgttaatattacttgacaggtgaggaagtacaacgcgcggtgcacctccagccgagcacacgcaccaagtacgccccgaacgatccgtcacctctttaaccccctcgcactcaagtgcatctacagtagtactacgttgctgaggtggctactaaaagaacaaagaaagaaaagtttgcgtcgtctgcagaagatgataatggtcgacgggcgaaaagctcataaatataaaaaaatcctgataggctctaagtcaatgtagcagatgctgcggctgcgaagcaggcgcaggagatgcgttgtaatggaaacgcaaatttacatgccacaaatactgtggtaagtcgtagatctcagagcttcttcgtgcaacgcgcgcgactttgtttctcgttgaattgttgctaatggcgatagcgatagtgacggcgcggccgcggtgaagatgctcacactaagttcttttgctatcccagcctatgcatagctctcgttctcatgtttgtagctacataaattattaataatgagtattcagagtggattcagtttgtggatggcaggcttgtaaagggttattgtagcgcgaagagactacagtacaatggttaggttgaacaccgatatcactcaacaccaatgtgatgcctgctacgtagcatttcgtttacaatttttttataaatggctgccacaaatcgaagagagctcgagtggttcaaggtgcaaacgtcgtttttcttctaggcgaatagaacggcgatgctgagctttcaacaatgcgcgcaagcttttttggtctccgtcgttcgtgcgcaggcctcgagtgacacggttcacatgatccgaagcattgaagttcgcaacggagaaatagctttgatgaagacgcgaaacgcggaagttagcgattatacaggcgccagcagccagtcaaaatcaagtgatgcacccgtacccggtgtgagactttcggcattcttgagatgcaaacttcttgaggaaaacctccacttccatgtccacatagtgatctctgtaagcaggaaacaacgcgtcacaaagcctggtcagcctctctacctgaaagtcacaattctttttcactacaagatactcaccgaacgccgcaaacccgtgctaccacagtcgtaacgtcatccgttgtgatcggcaagttgaacgagactcgacttgcagacacggttaccatgttggagttaccggtgaagactctgccgcagtacagcgctgtcttgtcctgaagttcacagatcacaaccatcagctacatttccctcgactaatctcacgcaccacgcaccatccacgagaggatctccccgccgaagaccgttccatttcggtttaaatggcgaggcaggaacgaagccgccagcgccacctcagtgtctttcacagacacttgctttgtccactcaccggcgccctctagcatgtccagaggcacagtagaagatggaggaatctgtcgaccagttgcctccatcttcttcaagcgtatcgacaaatctttgcgttgccgcgcaacttcctgaaggtgaaggatgcggcttccgttgctggggtcaaccagctccggcagtcctcgataggggcggttgttctcatccagcgccactgcagtcattatcgcatcgagagcgtggacaaactctcgcgtcgcaacatcgtggcgatacccggtgacctgcagcaaccacaaagtatacttcagcacgcagcattcacggctctcggaggcagcaatagtgctttacctgaagagtcagcgaggaccgtccgatgttgatcaactcgccttcgaagcgcacgacgtctccatggaagattggcttaaccacttccagatgctccagcgctgccatcgccaccttcttggaaattgcactatagacaaaccagtcagctcagaaccctccatcatatcgacaccccaccaccacgcacttttccgctactgctccaccgaagttgtcgagccggtgcaatatcggcccaagacccaacaacttccctcgcaagtgctcgtcgccctacaacagtctcagtaatcagctattgataaattgacagtcagtctctatggtagaatccacacaccaaggtgtcggcataggccagacgcgtttgctgcactgtcactgagtcttttgctgccgtcgacatggcggagcgctgcagctgcgagagggacgagtttgccaacgatctcgagaggacgcggagcatccgacagccacttgacaagttcaggaatgacacaaggggagagaatcgcacattgcgttttcacatcatctaggacactttcggctgttttctgtctacatcttgtcgacgtatgcagtcaaccagctgagagctcacggcgtgaagcggaagttggtggagtttggcgttgaaagcgacagcggctccagcgtcagcagcttgcgctcctcgtcgtcgaacagccagcggtgctgggccttgagcagcgtgcgcatgctctcctggtcgctctcgtccaccttcaggcccgtggatatctgcttcatgcggtacgaccgatccaggttcgcgaccgtgaagtagctgcacacacagacacagagagataaccaaagtcagtcgattaacctagctacatgaaggcagtacgataacaacgatttagtacgcaccctgtgtgcgacttgcggcgctccttggagccgatgcggccgacgaacacctcgacttcgacttccaagtggtggcggctgaaagataaaaaaatcgtgagtcaaagagcctcttcgtggcctaattcatgggatatttcgtaccgagcgctgctgacccgcgcgtgcatggtgacgatgtcgtccatggtgatcggcagcttgaagaagatgcggttcatggagaccgtgaccatattctggttcttggtgaagttgcgcgcgcagtagagcgccaccttgtccatccacgtgagcacctccccgccgaagatggtgttgttgcggttgaggtgcttgggcaggaacgagttctgcacctcgatcagcgtgtccgggatcgggacctccagcgaccggccgtagtcgtacgtcttgagcatgtccaccgacacgtgcggcaaccggtccacctcctcctgcacagcgcgccagcgagccgccagttccttgcgctggtcggcgatctcctcgtgtttccgcacatactccgggtccagcgggtccatcaatttgggcagccccggactggggcgcatgttctcgtccagcgccacacacgtcatgatggcgctcagcgtgtggatgaacttgcccgcctcgatatcgtgacggtatccggtgatctggacggccaaggacgagcgccccgtgtaaattacttcgccttccagccgcacgaggtctccgtgagcaatttggctcttgaaatccacccgatcgaccgaaatcgtcgcgatacccttgcacgccacactaacaacaacaaagggttagcccaaattcgtggctttaaatgctgtttttttccaacgtacttttcagcgacagcagctccgaagatgtcgaggcgctctaggacgggtccagcactgatcaacttgccgctgagactctcctccccctattgtaccaacaacgctacattagacaaaaactcctttggtttcgtatcaattgaccgtccacgtacgataatgtcggcgaatgcgaggcgcgtgtcccgcgggttcacgaacgtttggtctccgatggtctgcatcctcacagcgctctggaatcgattgtggcgagggcgcagccgcgtccggcggatcagagccagcattcttctttgctgcaaatgggccggagtggacccgccgttcacttctcggggaatgaaacgcaagccgccgaaagtatcttggcggctgacgtggccacggcagtttaggggcagtctagtgtagtggtacacgtgaactgaagatgcgcatccccaagctgaagaagcagaagctgaggctgtgaagcactgcatcctatcgaaaggattaccaatacagttgcagttgaatacatgaggtgggccacacacaataggtaggtgtaccacaccataaatgaggggcgagttgcttcatgcacaattgccttccaggcgtacccgatttggatatgcttaaaagtctacatttacttctaaagtttgttcaccacaactactacagtagtatttttcatcaggatgctggtcgctggattcttcttcaaagagcaagaatcaactatgacggccagcgactttcattttgagcgcgtgaagacgaattcgctgagctccttcattctacaatcttggtacctaggttgtttaaatgcgaatctcttagagcaaggggggggggggggggtcgaaagctgaaagtttaaaaaaaaaagaatggctggagccgctgggtagagggagaggtactcggtgtgcggggttgatgccgcgctcgcactgagtgctaccagcgttaaccgcaaagcatataataacatgaaagtttcaaaatgaggcaggtgttaagtatgctgtttgcgtttgtgtatgtatctcttcgtgaatgaagcccagtgtactccgacgagcataagcgccggttaaagcaggttttgcctcgtttcacacttctcatctacttcggcgtccttccactgcaaggggagtcgaacgcgcaacttttagcgcagcactggtcgaagagggctttggtgggagctccgctgcagcatttactgatgttgatgttactgtgggagcgggcagggccacagttaccttcgcatgtccccgtgaaagatggcggccagaaacttcatggcttggtggctgcgcggttggtcgcttgagttaacgaggcgggtttggttgacttggcgaatcgggaactgatagatttgaccccgccgttcatattagcggacctcaacgacgagctgccattgtccagcgaattgattgcagcggtattctttcactctcaacattcgagcggggaaagtgagacattacatgttgaagataacgcacaggatgagttcgatgagttgtgttgagctgacgtggaccgtacctattatatacgtaacttacatgtgttgcgcttcttgcaggttagttttattatgcatattctgctcgagtgaatcttagagtgcactagctgatagtgctacggtagcactgctaccaatatcctgtcagcaaacgagctgtgtttctgtgtttccatcttgcatgtatcgtagcctccaaacgtacatgtacagcatgtaagttagtaagggccttacagtacatgtattacaaaatagaccaacgaaccagcacgtggaccagataaactggtatggtatgtgcctgtatgtaatattactacatgtactcagtaagttgcacgtcgaagcatgcggcattgctaaaatggatccttgataacaaacgattgagctagggacacacagtagtggtaaacccctgttgtgggccctgtagaatacgaaaaaaagtaattaagtaattgcttttaatggacgtttcgtttctgctggcctcaatgtgaattgactttttgttgattgcagcaccaatacttgtagcaaaaatttgcgtctgaaacgccaattggtacaaatatcgagaaagttggagcttacatgcccgtggcaattcaagctaatacaaaagctgacgtgacgctcgtacatgtatgaggataataaggcggcataatttcttggttacccgaatcgaagggaaaaagaagtttggtgatgttaccgtgctgaccatccattcttcagggttgcaagttgcagcctgcaaggtagtttaagtgacgagcttccatccaactcaatcgcctacatacgtgtactctggaaaaaggacactctgttcgcagttacatgtagcatctgtcagctctgtattgtcaccaccggcaaccgcaacttcgtcgtcggttgtgcgacaacaaaccaacactaatctgcatcgtactgtacaaaaaatggatcattgatcacgaaatatttctgatgggccattattatgagaaataggttatcggcgccacgccattgccgtcgtgctggttagatacacacgattaaaccgatcgataaacattgcaattggcattttctccaagctcaaggatttctctgcatcacatgatactgggtaaaacttgggtgacccaacatcgaaacgaggagacttgggtcctcgattttagttacagtagcccaatcggacaatgcgctgtacggtagcacaactgcacggtaggaacacagcggtttgcgtccgatttgccagtctggttcatgaaactggtgagtcagtggtgacagcctgcagcaaaacactgcgattttcgatcaaggcaaaaatggcacgtgaaagttgcgctaagccaatttgttcgcgctgaaccgtagttgttcaaagtaaacttcgctatccactcgtggaccccactttacgacatgctcatcaaggattctagcgatgtatggcaacaaaacaagagcgatgcgcaagagaaacctgtcgaaaaacatgtcacagctttaccaaaactcctggcgttgcattctaccgacctttagatgcttcatccagcaagaactccgaccacatatctgcaaagctcttgccttccacagtggatgggtcaatggttgtacctgcgctgccgccctcacctggagtcacgagaccaataatggatgagaataagccgccaccgccattgccttcaattgggtagccaattcccacacgccgtttctgctcctcggtgaagccctgaagaaaaagctcgttgtcagtctctatcgcgaaggtataaaagtgtagcgtggatgtaccatcattcgggccatgagttgaagtacttcccccttcttgtcactatccacatatgccacctatatccagcgagcacagaaccaatgtcaggcgaaacaactagaaaactcaactgaaagccctagcaatgacgtagtaagctgaaagataacgcaccactaattgtgccgcgagactcttgtctagcacgtcccgctctgaattgtattgagttgctgtgctctcaagcgcctggccaacacgaaaaaatacaatggcagttagctcacttagcaaaaacttcggcaaaaaatcttcctacctcgcgtagctgttcgcattcgtgcgtcttcttcgcaagtttctccatgactcgctccaagtcgttatcttcaccctctctaggctccgaaagtggctggcgactctgcaactccctcttcacttgttcaagctccgcttccatcgaagcaacacgctctctttgtgccttgctatccacctggaactgatgcagcacaccttcgagagcatccagatcgcgctgtaatctctcagcatcttgctgcgccaccgccttgtccgcttcagacgtcgtcagtcgtgcctctaactcatacaaccgctgactatcgatggagcttgcatgctcctcgctttttgccatcaacgtcgccttctcctcctcattgacaaccttcatcttctcaatctccgccaataggtacatgtagccctgctcgtactcgcctgctctcgaacgcgcttcacgctcatcatcctgcagggtttcattcgctgcttgcaactcttccacccgatcacgcagcgaaactagttctttctcgtgagcctggcattgagcagcaagggtatcagcctgaacccacaacattacaaaatctatcagtacatcaatcacacacgtgtccgtccaccagcagcccgcacctcagcttgcgcctgctgcagctcctgaacgagccgatcgcggtccgtgcccgactcttgcccctcttcagcctgcattgtcacggcatcattccgtgcggtctgcagccgctcaatagtggccttctgctgagcaatctccacttcctgcacaaccaccaagacagaacaaaataattgtgatgaataaataattaaaatctatctatctacaagaagtaaaatcctcatccacacacctgctctctcaattgtctcttgagttgacgctcttccccggctcgcgattccagctcctgaacctaaaaaaatccataaaatttaataataattttataagaaattaaaaccgttttggactcactttcttctccagcgtctcgttctgcttcttgcgctgcagaagggccctctccagctcgcaaatgtactgctcctgctcgtcctcttccgagccggcgggcgccccgggggcttcagaggcggcagcgggggcaggagggggagccacgacggcggcgaagcggctccagagctggtcgtcgtccccttgcgccagctcctggccctcctcgggcgccactatgtccaccagcccctcggtcagtcgagaccacatcgcaatcgacgaagttatttttcttcttaccggtattgaaatgtagttgacctattattatgtgcaccacataagacatacgccacagttattataggacgccaacttagctaaaatacgtaaatacgttgggacacattgctggacaccaaaaggcttggaacaatcaccaggtggctgctgtcgagattaatccaaatttcctggcaggacggcagcggacaaagggctgcgtctgtatgacttagaggcgtgtctgacgatgtcggaagcaaacaaggcggttgatgctgggagattacagcggggtctgaaggcccttctccctgtcactcgcaaaagcaaaacaattcgtaccgagtctgcagtgcagcatttaggccaaactattgggcttgcatgtatttcttcttgaaagaagtcctgcgaggcgtaagcgccagttatctattcttgcctcgcttcacactcctcgtctacttcggggtccgtccgctgcaaggagagtcgaacgcgcaacttttcgcgcagcacaggtcgagttcgaatttggtgggggccacgttgcagcatttgctgatgttgatgctactgcgggagttggcgtcgccacagtcacgtccgcatgtcctcgggaacttgacagcttcttcttcaagtttcgcgcggtggagctgggcacagcagccacgacagcaaggggaacaaagatagaggcgacgaacttcatggctgagttggttggcgatcggtcggctgggcgagttggttggttgacttggcgaattgagaactgatttgtttcgaccccgttgtagcagctccggcaagttccaatagctactgtagctactatcggccagtgacttgactacagctgtatcaaccttttaagtcatctcaacttttgagcgggtcgactgagacattacgttgaagaagacgcgcaggatgagatcgatgcgttgtgctacatgtattacatgtaatactaagtacatgaagtatactgtaccttaccgtatgtgcatacattgtgcggtcaccagtacttagcaaagagcaaattgaattgtgttgtgttaccgcggctctacagtgctgctagattctgttttcttgcctacgagaattcgtagcggttcttaacccggctactagcagttctagaagctcttgtgttagcatgagctttgtcggcttggatatgcaagcgacagagacgaggaaagcctggaatcgtccacactgcctccccagggtctgtcgcacttgaaacatgcactgtaacatgatggcttgccgttggccatcactcgtcgtcaggtagttgggctcggagttcgtcatctccgtgctggtcgacataggccttcaccaacacgggcacgtcctgtaaaaggcttgtcagaggcttccatgaatcttcaatatcttggagacctcgccatgacactggcatttcccactgctgagccacattgttgtaatggtgctctcgaatttctttaacagccatgacgataccttgcttgctgatgtgctctagaatctcttcgctcacgtccatgctggcgtcgccgaaaaacttgagtctcgaaccatgaacctccatcgtttcacccgtcagcaaatgttcaatcatgaacgagaactcgcgagcctcgattaccctatatgggccaacccatcgcaccatcagcttgttcccacgcagtcgctggtctactctcgaccatagaacgtagtcaccgacactaaaattctcaagctgaccgcgcttcgccattatctgatagagccttgtcttttccttgcgatcttctacttcagcattcatcgcctgtatactctcacgcaattcattgatctcgtcttccaccgtatccaggtcaattttcatcagtttgtctttgttctgcatgtttcgaggcagtagcagtgtgtccagctgcgttggcacttgtagacccgtaaaaagttctagcggggctttcccgccgagtgaagccactggggtctgattcaaattggcctggactaatgggaggagatactcccagctcttcgtgtcaagctggtactcgagaatgagcacacgcatcacttgaagtatgtccctgttgagacgctcgactgtcccgttaacccatggggtatacacgggcacgaaagtatgcaacgctttcatgcgttctcgcagctctccattaggttgttcttgaaatgagctccgttgtctgaaacccacatggcaggaagtccaaagcgcttcgcccaatccagaattgcagccactaccacagaacttgttggcgagtcacacggaatcaattcgcagaaatgagtcaactcgtctttaagcactaacagatagcacgtcgtcccgtaggtctcacccatgaacaaataatcaaaatgcagcacctcattgcgagcagctggctcacggtgctcactccatggtctctggataatgagtccgcccttaacctgcttacacagcaagcacgctgcaacgaagtcatgcaccaacttgcccagtgaacgaacgcgtcgtcactaagcggacggagcctagaaattgcagtggacgctcgtgtccgcacgattttgatcaaaatatctgaatcaaatttgcgtgatcgcaaaacagcttaaatccgcgcgagcgatgcaggagatattcgagatacttagccgccttaatgataggtatccttctttttctgcaattgaccaatgtaactgggcacctttgaaggttcctcctttgcacaaaatgagctcatgagcttggtccgtgatccccgtagcattatcccattcctccacttgcgaaacgatcaaagaccaacctcggtctgacgcgtcggtcgtgacgcaaatgacagcttcctcactcgggaacgacagcttagtcgatcgcgcaatgtattgcaaaaactcctggtactgcatttgctcggtgtcgcaccaagccagactgagtccttctgcgtagcgttgcttgcgactgtgtccagcgaaagcctcttccagcttatcttgtaagggagctgcgtgctgcacaaaatctacgatagactcccgaagccaattcgccgcacacaaaagcttctgcaagtctgcagcagttgaaggaagcggcaacgagcaaagagcatccacccgctcggggtcgtggcggacaccagtaccgtcaatgaggcgcccacaccaggagatttcacgcgcaaacaggcagctcttttttgcgttgagcttgaggccatactggcgcaggcgctcaaataacttcgtcaacacctccaacaactcctcaacagtcctcgcaaagaccacgatgtcatctacccagatcagtacattttcgtacagcatgtctcgaaacacttcttgcgtctggttctggatgtgaatcggagagtcggtggcgccctgaggcactcgcgtaggtgtgtagactgtatcgttcgtgatgaagctgaagaactcctgacaatccggatggagcaaaagctgccagaaccctttaaaaaggtcgaaagtggcaaagaagcaggcccctttcaccttagcgatcaccactagtaggttcggcattgctccagtaatagggactgttcgcttgttcacggggcggtagtcattagcgcagcgaaattcttctttcggtcccttcttacgcactggaatggctgcgcatgcccaccggctctggttgttcctgtagacgagctcaaacgcttcgagctgcttgccatactcgcggagaaactgggtcttcgcccctgaatattgccgtggtttggtacgatacggcaccgcatcatcaactatcatcacgcgcaaaggctccagtttcgccggtggatccgcgcccaacttggttctccacgaatccagctcacgtcggaccaaatcgtgtaggctgttcacaaagtcttgcggaaagccattctcgacagccgtcctaatcatgtcgtcgaagtgtcgacctcctccgggttcgtcacgccaacaatatcatcctcaacaatgtcatcactgtcgccttcatgctcaactttagcagcgagctgttctagcatttggtcaacattaattcctagcggcttcaacgtctcgtcgccgactaggagctcatctgcttcgccatccatcactatccactctaaacggcgtagtcgcacaggtcctgccgcagtcagcagctgcacgtcaaggttgcatttctccaagtactccaccaatcgcccatccgctacttccactttcaccggtactgctagcatctccatcgacactgctgaacctgacgctttttccagttcttggatcattttcttcgtaatgacattacactcggcgccggtgtcaggacgaaaaggtacttcgagtacttcattcacaatagcaaccctttctcccagtggtccgagcgaccgcaccgccttggcccgtagtcgctggtttttcatgtcgttcatgcgctgaagtgctgcttccttgtctgcatcacttgctgtagggcaatctttaacccaatgtgcgccgctgcacaccaggcagccatctcggggtggcgctcgagtctgcacggtttctttcttgattggcaatccttgcttggtactcggacttttactgctaacgagtcctgcaggctgacgcatccgtgtcttagtagatgtcagttgctttgtacgaggcgacttcttgttgctgtggctgggcaagctctggccgcgcgtcttgtccgccttcagttctttcgccagcatgtggtagtgctgctgcccacgagcacgttccaccaaggcctcatacagcgcaatgtcatctttcttcagcaccggacgcgcgatgaccaggcgctccatctccagtttcaacatctccggagcgatgtgcttcaacagcaccttacagcgcagcttcatgcgttctccgtaggtagcctcatcctcacgaccgctcccgagaattccactcagaccatgttcctcaatgatcctatcgaaaagcacgaaatagttcaaaatgcgggcctcagtgtcttcaatctgcaggtccatgcgtaggtgctcggtgaaaagctggtccatgtcgggaatatggctattctgtagcgacgagcaccggcgtgtaattgctaggcctaagtcttcatccgtcacggcgctaggctgcttcttcaacacaaagcgggcaagatgatcgagaatgcggggctcgatcgagttgcgaatggaggtgacgatgtgatcatactcctcgcccgtgactgcacagcgattgcgaagttttgcttcatactgtcgccgccgtcgcatccacgatactagcgacgcctggtcccggcgcctgcactacctcgaagaccggttgcggtacagtcatttcaacgtcgccttcagcatccgtagtcatcttgcttcttggtcggcttcgtgcctcacaggccgacttgtcctgcagcggtcgcctgtccttcttgttcttgacgcggcttctggttcctccagaaagttaactttgtggtcaccagtacttagcaaagagcaaattgaattgtgttgtgttaccgtggctctacagtgctgctagattctgttttcttgcctacgagaattcgtagcggttcttaatccggctactagcagttctagaagctcttgtgttagcatgagctttgtcggcttggatatgcaagcgacagagacgaggaaagcctggaatcgtccacacatcgcggtttttggaggttgttcgcaggatcagcctactcaatttaatttactagactgccttagaaatgttgtctgcgaacgtgcttgtgtaattgccatcttatccttatcatagcctcctaaaatagagtacagtaccggtaccgcgaaacggaccaacaattctgcaggagacttatgtttcggattcatgtatgtaccagataataatcgactatgtttgtcgataatactagtatgttgctcttcgaagcaaacgaagcacaaaaatggaccctcgataaatagggcattaccataaaccctttaattgtgccccatggggtactactaaatgcacattagttccccaaccaccaccaaaagggggctggggcactatcagatgtgggctacaaaaacgagagccataccggtaggtaccgcagagtttctggacactatgctgcgtgaacttgagagtaaacgatttgcatcaaaaataagaataaaagcagatatgggagcgcgtttgagatggaactgagatggaactcttaggtgcaaggtttaggtcgaagatttatattaattgggaagatattcaatcgggttacataaggcactgctagagtaatgacgataattggggcgaagcccccctataatgaaatcgctctgttttatcgctctgatttactttctttcgatgattttatggatagggctggggaaaggtttaatgattgcctctcccaggggcaaaaatgctgcattttacctctgtataagatcctttcaggctcactgtccgacggttccgagtgaatatacatagaagttcaggggtttagcctctagcaaagggtgcgaaagccattaaactgaggcccgtcttgtaggaggccccttccaaatagggtatatatgggctgtgggctctggaaagtggatttggcgtaaaactgcattgttttagctaaatggatactctgttttgataaacaagcgaccctgttttagcttcggaaacgttgctgcgcgaaatagctagcttcgttgaggcttgcattggctgcaagacgctagctactccgtggagccgtgagcgatggcgaaccatgcacagccgtcaccgcccgccaccaccttgtgttgtcgacacgccttcacggaccgtcttcgggtgcgcgaagtcaactggcctgctccgtgggtgctcgtagacacgcacatcgaggaagagaaccgcgacaacacccaccgccagatccccttgcaattcgtagttgtatctgccaagcgatgactactgtgccgctgctgcatctggacgttgctgatcgaggtcgcctccgagccacgtcaatactcgctcgcagcccatattgacggccgaccttcgagtgtgagactccaagccgaatccaaccatgaggcttgccttgccaggttttgttttcgcggtgcttgtacccaatgtgaacttgggtcgacttggacgcctcgccaacatgctttctttttattatcttggcgacatatcgagattgtggaaaagtgctgtcgtcttcattttatttagaaaaatatttgcatgaagtgtagtttggttaacaagatgaatgatgcgatccctttcagtgtcaaacgatgatggactctctggggacgctgtgagcttttccaaactcaaacgatgcgtaagaactatatattctctttttctaacgcgggaaagagcaaggtatgcacaggatgcatttggcagtgaattggaatgaaatacgacttttgagcatgtaagcccttgagccttatgaatcgtcatagcgtaggcaagccttaacgaaatgccacagcgaacgactttaaagtcactccttgtacttccccaactcgtttcctttggaatgatggggataatgttaggtacgtttggtaaaaacgatggaccaaagtattcatcgactatttcaaccaaaacgataggaagttctgatccagacacaaagatcatgtcgtacacagtagcgttcgttccattgcatagccctgctgtttgctcagcattaaatgtaagtgtgacaggagcaccaattgctaaattgagttggattggtacaactcggtctctccttgggatcttttcttgtgcctgatctaaaagagctttaactgtgccttgaggtacttctctatttgcgatcaagcgtttttgcttcacattgtgcacggactttatgtgcacaattggagaagaagcattctgcagatttacgtcattagcactatcaacatctgcgttaaggtatgcaatgtgcttcgcagcatgcacccactcaggcattgcgttggttttgaagaatcgagtattaaaaaggtcaatgtcctgctgtgttggtactttttctcgcaatcttcgtagcgcttcaaaccattccgggtctatgttgactgcttaacgagcatacgcatttaatttcctcccaaatttcgcgtcctttgcgctggatattgtcacgtattctatctgtggatgtagctagagagtaaggggttacagggtccaactgggcactgtctcccgtgaaaatggcatctcttccaccaaatcggacctcgcgctgatcaggccatatctctcgcattctttggtctatccaatatagcattccacatgatattacgctaaatccgtcaattattaccaggtgtatatccctgaagcgctgctgtagagacaatagcttagctgggccgttttcttgcgtggtcattgcgacgtaaggtttggaaaatcttttttgtgatcgggggattgctgtaaattgaaatgaaatgcttctcgctgattttttgcccatggccgcacatattttgtcataaattcgcttgctctattaatgtcttcgttagagtagttgtgctttggcttccattgagtatgaagatctgcaataagtttttttatctctctcgatttccatctcatgctcattgaggtgctcatcaggttcttcaatgaaaacatactcggacgggggcagattagtgcagcattggttctcgcgagaattcttcagaagatttaattgacattgcctcgttacctttaaattcacttcagttcggagttcattgtcgaggtttttattttgttcgtcgtagaaccgactaatacagtcatcgtcagtaatcggtaagtcacttaagtgtctccaaggaacgtgtaaaagcaactcagcaaaacaaaagttagggtttgatgtgtctggtgccatccatggcgacatacgaagaacttgggcttttcgacgctgtgtaaaaaacctagattatcgattcgcttccaatacttcgctgttgaggttacgctttcaactaccgcatagtgctctacaaagctagcatatgacatcgacttgaacggttcttcctgaggacgcgccatgcaggctttttcgtatgattcaattttaatattatcgggttgaggcggtttgtcgatgcccaagttccgtaaggcttctggttcaactcggtaatatcgcaagtgatgacgcaaaaccttcactcggcttactttacgagacttaccatacatttttaattctcgaagcagcatgaagtaagcttctagggcacttacctcacgaacagccaatgtggcgttagctattcttttaagaatagcgtagtaagggagattcgggtcacatcgcttaacagctgcagcgaaaggattgctaatgcaagtgttgctaaagcgctgagaaattaacattattcctgttgtcctgttgctacccaattgcctaccgttattcgttttcaaaagtacaactattttcagcgtacttttgcgcggaggtaagattaaccgagagttccagggctcggcaacggtgtagtagtgcactaaaggaacatgtcaggttatcaaaatcgatcagcagaagattagacagcggaggaccgcaaaaccgaccaagcaattgatgcagcttgctatacaaagcagctacgtcaaagtacacaacagttacagataaagcaaatcgaacagactaccaacactggcggatagctccaagaaagcacttcaaacgatgtagaaccttcaaaatttctcccatattctgtcagtgatcgccaggatataggaaaaattcggaaattcccgtattggtagaggtctgcgcatgaggcatgcgtgtgaagtgttgatacacaatctcgatacactcgcttactcctagcactacaggtcaactaaatgaagtttgacgacaaattaaatgatttctcagcgtatcaagctgttaagctttcttgtatgaaaaggtttcgatcggctctggggggggggggggggtgcatcgcgaaattttgtgtagagcacaatatttagtgtcgccccaaattagcagcgaggaagcgcagtgaacgaggtgctcagctagttataaaaaagataggaaaatatggtatctcagcagaaaacacaaatagcactccctatgttaggccggtaacaagaaacttcacgttggcaataaagttccatgttttaaggagagtggggtactaaagttggcggggtactcacccgtcaacaacatcggtatgcccataacaattcaaacagacacaaaactgcgacggtcgtgcaccctcttccacggataaggtgacggacttacttgcgcttaaactgggacggctgtttggtgtgcacaatgaaacacaagagtttagttgaacgaaattctgaatatatccttccgccgacaactcgctttgatgatgaaaaacatctaaacgtgcagtttagtgaagatatatgatatgtgaagcggtgtttatgccacgtagtggtacagacaccgcttcacttgttagcgacaaagagttatttttttcttattgaaatgtatctagcctaatattaatttgtgcacacaaaatacatacgtcacattattatgggacatcgactaagcaaaatacgtaaatactttgcaacgtagagtttgatagtatagtttttttctgagagcacataatgcgtgacaccaagttgctgttggtgtcaccaacgtggctgctgccgaggttggccgaggtttcctagcaagggttggtacgtaatttatcgtgacaaccttctttactttaggtaatgtagggcatggataccttcaacattggactctcatcgcagcagatacattaattgtgatgggatctcgactctttaaaaagtaaaacttcgttcgcctctattttttgtcaagcccgtcgttgcaccgaaaatagtcggcgtgaggtagtaagcgttgtctgcagcttctacgtctcggctggcgtccgggttggtcgctgtgctttatggagatcgtagcagtagatcgatggctgcttcagttcgcggcggtggacgaagaagagagcgaagctgtggctatcagctgcgtcgagttcctgctgtccgagaccaaagcgtactaccagcagcgatgtctggctcgagaagcggttcgagcagtcagcactcggctccgggacaatgttcttgatacagtttttgccgctgcacttggcgctgaacaagcgctggatagtcaccggttcgaagccgagagcagacctgaagctgagctaaaagatcgccatgctgtgcgcagtgttccatccaagagtcccgaaaagcccgcatcgaccttacaagctctgatggttagaaaatcttcgtcctcgccggcatcgcgtgttgggagttctccggaaaaacttcgatcccgagcaggtggattgccctcgagacgaaggcggaaagtcgacaaaggtaatgagctgcgccttgttatttttttaaggctggcgttaatttgcattccactgtatactgtagtcgaaactgagaagcccacagcgatttattcgcctcccgtgcaaacgatcgagaccgagtttcaagacgacgagaaacccgtgggttttgttcggtgtatttcatctgataaaaaagaaactgatactgtggatgcggataggaaatcaaagaatggcgcgagaagtgcttgaaaagtctcgagacgtcaacgaagaagagcagtttgtccaagtgggtcacggttgcgcgagctttcgcgatcccagacagtcgggtctccatggaggtgggggtgatcgcagctcctcctgccaatatcgcggcgcttgctgcgacccccgtacggatgaagaccaatgtcgacagcttctcttcaatcctcgaccctaaggcggaggtggaagagcctccaccaatagtcgaagagaacaacgattttgtctctacgcggcgaactagccgccgaccaagtgccgttctggagcctacagctcggagcttacaacccatgtcaactgagattcacagtatagcggagaatccacagcgtttatctaagcgaaggtctcaatccgccaatgtgaaaccggcgactcagcagcagcggaaaactacgctactgaccgattcgctctcacgacgcaagcttacaagaaaaccctcgtcctctgagtcgctgtacggtaacaattccaacaacgggtggagcagcagtaggagtctctggcgttacgagcaggagcccggaagtggcacaagccgcactttcgtcgctgatggcagcgagtttaatgctgcaacgcttccagctacgatgagtgtcgcctcaggggtggtgctcatgcagggtgaatctgtcgtcgagggccccgagtgggtcgagaacgctaccaccatgtcccgcaagcgcttcgatgtgagtccaacaacatacgaatggtaggtaagacagctatgctgaccaatctgcaaatgttctgtagcttcagcagcgtctagctaccgacgcactactaaatgctccatccgagcacgagcttcactcgcctccatcatcaacgctcggctcaccgctccaattcggccgttatcccacctccccactgtcggagcttcactttcgtgattatgaagaggttccgcctgaaccgatttcgatccctcaactgtcgccgatttctgcttcggcacttgcgattcctcgaacggtgagttgccgctcaccattttctccccaaagttttaccgctcacttatctactacttgctcagcatcttacgccgtcactgtcaacgccgtcccttcgagttcggacgtcggtcacgagtggcaaagccggaggttccttacatcccagtgcctcgcgtgaagctggagtgaaccgtcgaaacggcagcatcgatggccatgtgactgaggagaagctgaaggcgcgtcctagcacagccttgagagccgtcgcaaaccctcccagactcgtggctggacgtgcaagagcggcgtccgctacgccaggaaacttgagaactgtggcgcaagcagctgcatcgatgaaaagtgcagggacggcctctgcgaagtatctgcgcgagtttccgaaacctcgaccaggagtgattcgcgtgcttaatgaccaagcggtggggctgataaatagtggagaggatcgtcaaaggactgcatggatgtcctaagatcaaacaataaaacctctcaacagaagccttacggtactgcttacctgctccgcatacaatcctgtttttttttgcgtcgtggtggcatatgaaggcagggaaacatgttgatttaatttgctgaggatgcgtcgcgaaacaaatatttgttcagatttcttcggtaaatttgggatgggagatcattttttacttcgacgcgggttgtacatgtagaagccccgacttgatcgactgcgtctcgtacgtatcgcggagtcggtcagctgagtcctcacgggtatctgcacgggctgccgaacacgcagctgtcacgacagcagtcagtaattatggttgtgcgttggaagcagcactgggggattgctttgtttttcgcggaatcggtggggccacaggggtccaccgggcatcgccatgacggtgggttcaagagttgcgccgaagcggggctgggaatgttggccacggcagcgagaagaagagcgaaggagacgacaaacttcatcgatgcttgagttgatgcggcggctttggggttcttggcaaattgggaactggtggaagtgagctgcatattcgcgcgttttcaagcagcccagtcagtttttttgccaaatgattgctgctcagccccttcaatgaaacaccttgtgcggcctccgacagagtaatactacggataatcaagcagttactgtatcgtgcgactcgcgctgcgagttttcctcaacgagcgcatcgcaggagacgacagctgtacagcatatacaacttcagagaagcacgtcagctgccatccaaagtgacttattacattaagtgagcttttcaagttcattttctagttagcgtgcgcaagcttcctagaacaaaatgcattcttgtatttacttacgtaagttacatatgggatttcctgttaaaacgtaggcggactggcttatgatatccggaattggtgtattcccaccccttggaggatttatgggagattcggaggccgacaggccccccgaactccgataaatttaggtgagatctccgaactccggccgcagctgccagggggggggggggcagccgttttccctttatttaccgagaacttgtagctgaggagttcgcagtaggcatggccttgtcagcagcgcgcaattataacaaggcagcagtggtcgagacggttggacggcgctcattccctccccgtctagtttatcctgaggaaaaggtggatgacatgcagttgtcgcggctgttttcacgtccgttgtttgtgtggatcccggagtatcgaggaggcaaaggtctgacgtcgtgcatcagccgagactgcaactgcaatccgaaggtggaagactattgccgtcgtgtggtggaatctgtggagtgcaagtgcgacctggtatttgtgaagtataggtgcgctgtaacaggatcatatttttccactgtgagctcggattactttgcgcaatggcccgatatgatttttcagtttccatttgttctgagccaaaagccagcgttctcgaactcactcatggagatggttcatgacggtattaccgcgcagaatgggttgcaacgtgccatggccaatatggagcgtaggcgcacagcgctactacaagcttttgggtctgttttccagttgtatcaagcgaaaccacgagcgttgcttcacctatctggcccccagaggatcagtatgcagatcaaaacaaagttgttgacaatcacacgcttacgacgaaatggctacacgctacagagatgtactggtcgctgtgtgaaaaagtgatgaaagactgtgttgtaaagagggtcatgacaatggatcactctgtcaagttctgcaagcggctaaagctgtggaaggccaagaggcaacgtgaatctctcaaagatgcgaaaatgcttatgctgttccagaatgaaattgggcagattattgggcggcggctgaccaggtctgaaaacgaggaagaaacacgagccttgctacaaacatgtgaagtcgcagtttagtgcgccttctggggatgacctggatcatgtagttgtgtcggataacgcgtcggctgtcaagaaaatggtcacagaagtgtttggtagcgaggtggtcacaaaacaggacccctttcacgtgatatctcgcatcactgaaaaaaggcgcccgtcaccagcaaacgaatttcaaaggaactctcccgtgcgatctaaaatgtggctcgtgaattgcgccctactgctgaaatggctcttcaatttcaaagtgtagtcagcggtgttttgcgctcaagtgtatcgcgcagcctgaacgattggaaagggtcgtgtctgagtaatttggagcagattcagcgtggcgagttgtacgtgggctcaaatacttacgaggaaggcggtcatcgagttcgcgtgatatctactagccaacttgagggctttcactcttccttaaaaaacctgcttaccagaaatgtatcgattgaggttggctcggggatcttagattggcttatcgtcaagcataatttgtctatcggtgctaagttcgggcgcaatccgcccatgaatggcgttgatttgatttcggcgggccatactgcattactctgtgtaacgatggtccctatttcgcctcagattgagtatgtgatgcagcttttctcttcgccgcttgtagccccgcagtatagaacggagaccgagcgggactttgactttgactcctgggcacaggtattttcactatttgaagataaaaaagacggaggggtcgcccccagctttgggctggagcacactacggtcgcgcgtgcaagctaacgatgttgcagggcttcgacgcttctctcgacgtggtctgtgggtgctttggagaaggactacggggtaagactcgaaacagcgtacacgatcgcgaatattgggacgctttaccgggcagatgctgcggctgcgaagcagatgctgcggctatgaagcaagatgcccgtagctagggggatcctnnnnnnnnnnnnnnnnnnnnnnnnnnnnnnnnnnnnnnnnnnnnnnnnnnnnnnnnnnnnnnnnnnnnnnnnnnnnnnnnnnnnnnnnnnnnnnnnnnnngtcatgacaatggatcactctgtcaagttctgcaagcggctaaagctgtggaaggccaagaggcaacgtgaatctctcaaagatgcgaaaatgcttatgctgttccagaatgaaattgggcagattattgggcggcggctgaccaggtctgaaaacgaggaagaaacacgagccttgctacaaacatgtgaagtcgcagtttagtgcgccttctggggatgacctggatcatgtagttgtgtcggataacgcgtcggctgtcaagaaaatggtcacagaagtgtttggtagcgaggtggtcacaaaacaggacccctttcacgtgatatctcgcatcactgaaaaaaggcgcccgtcaccagcaaacgaatttcaaaggaactctcccgtgcgatctaaaatgtggctcgtgaattgcgccctactgctgaaatggctcttcaatttcaaagtgtagtcagcggtgttttgcgctcaagtgtatcgtgcagcctgaacgattggaaagggtcgtgtctgagtaatttggagcagattcagcgtggcgagttgtacgtgggctcaaatacttacgaggaaggcggtcatcgagttcgcgtgatatctactagccaacttgagggctttcactcttccttaaaaaacctgcttaccagaaatgtatcgattgaggttggctcggggatcttagattggcttatcgtcaagcataatttgtctatcggtgctaagttcgggcgcaatccgcccatgaatggcgttgatttgatttcggcgggccatactgcattactctgtgtaacgatggtccctatttcgcctcagattgagtatgtgatgcagcttttctcttcgccgcttgtagccccgcagtatagaacggagaccgagcgggactttgactttgactcctgggcacaggtattttcactatttgaagataaaaaagacggaggggtcgcccccagctttgggctggagcacactacggtcgcgcgtgcaagctaacgatgttgcagggcttcgacgcttctctcgacgtggtctgtgggtgctttggagaaggactacggggtaagactcgaaacagcgtacacgatcgcgaatattgggacgctttaccgggcagatgctgcggctgcgaagcagatgctgcggctatgaagcaagatgcccgtagctagaataactaatcgtgtttcttgactcgaattctgtgttaacccctccagaccgggagccgaaaagaacatttaaactgcatatgcagcgtaattagacttgatgtttgtatacaaaaatggttagggaagataggatgcacgatgggggccaacaaggctgtgctaatactgaaaataacctgcatattggctccagtgtagcatatccatgctgaataatgctacggtgcccgccgaacagcaactaggacctagcgagtcccgattttcaaaaaatcggaatttgaaacttcccatacaaacacttatatacaaagtaggtgtgtcacctctaggcgttctgtaagcttgtggcacgtccggaggcattctatgcactatacagacataaaatgaaatagacatccagaaaaatattcagggggtaatcaaatgaaaggttaccattgtgtacataagacaatacctaagatgcaatttaggatgtgtcgttgtagacagaagcacgtcattctgtagttgaagcaacaaatcagcgaggattaccaagtttgatcactaagccaaatttcactgacttcaacaccgaagtagttcgttgcctggacccttcccaactaacaacacacactaaagcgctacacctgcattcatgcatgaggtatacaatgagcggatgtagtttaccacagggtttctccatgggtgcaagaagttctacagttgaatacttcaattagctgcagcttaggttgatcgctgccaaagccatgactttgacaatccagtctacaggaaagcagcgattacaagccgtttcgctaattggagcataccgcgaaggcaaagttgcatctagaactatgtgtgtgggtatccaaagccttactatactgggaaccgctttgactgcaattgcatttatccaagtcgcttatattagtttgcaaacgttcacgttactacctctcgttcttatcattaggagcgccagccatgccaggtgtcagctcgatccccatcggtcatacaatgaacaccaaagcggcatctccgccttggccggaattcgtctcggctcgttcttttcgctaccacctcattcgagtcgtcgtcttcactcaggcggtctcgtttcgggctaatcatgactgcttggtcgccgtagtctccttcaatagcatcaatattactccggttagctcatgtaggctacgatacaacatacgtaaaataaactgcatacaatgccgtatacaagacatcatgatatacaacataccattgttcggagtacgccatatcgcatcaactcctgccgtcgtcttcgccgcttacatcaacgccaaaagatgtcggaagccttgagcgccgggatcctgagtgggcctttcccccaggccttcgaacgccaggtacgaatgcagcgggttgagcagtgcgatcgagcccaacagcttgacagagtacgacagctcgtacagctgcagcagcagacgcttgcgtgtaagcagcataaacaactggaccaagactaatccaaagtcttgtcagcaagcatgattctcgcagacatctctgaataatgaccaaactttccaagcgctaaagaagcaccaaacgcaggagcgtgctatcatgaaggacaacacgtaccaaataaaacaggtcagcaataaggtatatcattcgttcgctatgagcgtaccgttagcgccgtactcgagcgccgatgactcgcacgatcatccgtgatttctgttgattcttctgtcgacttgagccctggccgcgcaaattctcgaatgaggcggattttgcaaaagcggcaaatggaagtcgctgcgagccacccagtccgataccttgcgattttgttcaaatcatactgtgggtcccgcgcccttgccaaacattatattccgaattttgacaaacgctggtctttgacatatggaaaaataaaaaggcgcgaacagaaactaaacgtaattttatcttgacgtttgaaaagtggtgtgtcgggggaaaggacagtcatacaaatttcaagtcaaaatttgcttaaactgcatatatgcagtttaagccttcaaatctaagctgtattatgcagcatccggtttgaaggggttaaatcaaaatttgtgctgcaaaaccgctattatggctcgagcgtaaaatctcaactgatactggtgatacataacaaggagaccagaatacgagtcattgtgcccaagtttatccattagaaaacgcacttgcaggtacaacctctttaccatgtctgtagtgtggagttgatgcagccatacaacgagcacgagggattgtccatttcaagtgtcgtttcttcgaaggcaatgcgccaaaacgtttgatcatttaacttgtcctacggacgtactaattcgaaatcgagtgtcgaggacacgccaactatttaacctattttatttttaatgcaccctaatgcactggaccgcagtcccaagtttgcctcacccaacgttccttagctatcccagcctacccaaagctctcgtcttgaaaccggtgcgactccggtgccgcccaaacggtttatatgtgtgggcagatcgaaccggtgtgctaccgacgacactggtatgaatcagtgcatatattgagcagggtacggatggacgaagtgaagtgaagagaacgcttggactgtacaatagcgctagaggtactaagtaagcatttgcattttctaaagctgcagaacaaatctcaactaaggctcgcatttttaatgttgtaaagcattgccggttgatatcttgcatctacagctttactaaagtaagaaacaaatccgggcagatgctgcggatgcgaagcaggagcaggagatgaccgtagctagtaagaacagaaattaataaaaaactaaaaaagaaggtttattcaaaaattctcctatcccagccttcgcggaaccctagttgtggcgagcactacaaagctatgccacatacataccaacatctatcaattctcacagaaaatcaatggctacttatagcttgcatacatgaattccacgctgcggtgcaaatgaggggcgtagccccaacatttctatttagagccaatgttctaattaccaggctacctgacatcctgtcggacaaatttgaaaatttgaagaccaggagctgtccatacgctgtgcggaggctaagacgttattttttacgtttagctagatattatagagtcgttgtaggctgaatgattatcctttgctactgtttcattgccaacctttttgtggatctggtggtaagcgacttctatttatttttcatgggttttgggtggtggcaatatggttagtagtcagtggctactagccaaattgacttacacaaactgtagtttaaatgttgcctgaggtacaaacaactttttttgacaaatttatcggtgctcttctagctgtcctcccgctggtggtgccctacaggctactacgtagccttcccggtataaactctcattggtgtgcctaagatggaagcagctcagatgaggtttaacttctagttttattggcacatgtgctcctaacccggctgctgcataatgccggattaggattttcattcattcttaggttgaccatgcaatcttctgacgatcctctccagaacttatcaagcctatcgctaggttgttattgaatataggagcatgctctcgaagagcaaaaccaaaaaataagtcatctacagtttgataatggcaccctcacacaactgcacccagtattctcttgaattctatcttcagcaacgtactgtaacgttgttttttgggggaaggcacatttatttctcttgagagcatacacgacgctctccttaattttttcatgttgttgcgatcacaacattacctccttcaagtgttgtaaattggataggcaaaaaaatatcatgatctattctgtgcatcacagatagcaacaattccatgcttttgctgttgttcaaaggccaataggtgctgatcgttctgagataactgcgctgtttgccgatgcgatgatcatgttgtggtgtttcgcctccatttgcttcgctcgcccgagatagaaagccattaaggcctaaagcagtcaaacataagcattatacatccctcccccggaagaacccgtgtaggcacctacatacctctttcgacctcgctgccttggacttgactacgggggcaggtggggctggactcggctttttgcgctctgggatcgactcgatgtttgggtcacgcgccaacttagtcgcgataggctttcgttgcgtcttgttagctggctcaggctctggcaaaggctgcggagtcgatacagcagcagccaccggcttgttcgaggtttctccagccgccgcaaaagggttcttgtcgtcaatgtctgcagtccgcatctcgccaggagtcagagacaatagttcggtaccgtcatcctcacccccacgcggagtgggtggcagccccagatcgatccactcgtcgccgtccacatccacgctgcgtccaaaagagcacacgacgtccattgtgtcgcgggcaccaagaacggaatggcctcccgactatctcgtctgacgagatgaaatgcagtggcgggcacccatgccgcgcgcagcacaatccttaaacggtacgcaaatcctccacgtcctccagtcactacctccaggtggcatagcagcaacagctggtggtgtttgtttttcgtatgacccggaccatcctggctgtgcttgagagcgaaaccatagtccactcacagtcctgagcaaggcgaacgtattataaggcacactcacgacaatcctaaactgacgttcgggttgaagttgtctgcttggcactgcaacttgactgacggattctaggcttgactcggtgtggccagcacaagaaccgagaagagaagaccaacttcgtacaatatgcaggtggggtgaacggaaaacgcgtattatcacggctttgattttctatctacaggagagcctggcacggcagttttgcactctccattgtccacaacccattcgtctgacacttcaaatcgcttccgatcccgcaccaacttgcttgtcaaacaaagcccgatcatgttgaagttgtatgtataccttccgagtatgacgtttacctactgaaaaaatagattggacagtgtcatgtaaacttaaacgaaacgcgcatcttcgcctgttccctttctcttcagaaaacggaatcgaattcgacacttgaaaggtcacccttgacagcaaagaaccagaagcggttacgcagcttttgccggaagattgccccaccccaccctcgagttcacttaaacgctctcgatgaaggccaagaagcagcgcaagccctcgcccgacgtggccatgcaggacgtctcggagcccaagcccaagccaaggcctagacgcgccaaaaagagctctgccaaggctcccaaggcggcggtgggcggcaagctggcaaagtttaaggaggagcagcacgtgagtgtctaacctcggtgactcgacttttgtatggtgctaaccggggggggggcaaaatggtgctaaaacttgtgttacagttgaagatagagacgaaaggtatcggccaggagggacaaggcgacgccgaaagcaaggcgccaccctcctctagcaagaagaagcgtcgacgcgctgcggagatcgaccgcaagtatcgctgtacttttggagactgcgacaaggtaagactaactctatcaggttttgttgcttgttgcagtttaggctagtgttaacaccatcacatggttaggccagctctaaccattcttttcctttttgtacaggcgtatggctccgagagctcgctaagtcatcatcagaagctcaaacaccccgaagaggtggcggaggcagctgcagaggcccaagaaaaccaggttcgttcctaaaacaaaacaaaaaatatataatcttggttaggctagtgctaaccgtgttgctggcaatcaggctcccacctacccggtgtacacccgcaatgtctctatccgtccagccacccctttggtcgcttttgcctcggactcgagcctgctcctcacccctccagccacctccgacctcagcgacggctttgtgtcgcaaaatgacgtcgcccctccctccgctaaagcccctcgccgcaacatgcgctctcgctccaactcggagccggtgtctctaaccgacgccccaatcgtctctatccccaagcctcgagccaaaacgccccgcaaacctcgtcgaccggccacgccgcaccccaaaaaggcaacaaacgcctcaattcgacgcgcaaaaatgcgctccaagtccgagtcgctgcccgaaatgctcccgttcgagtctctaaccgagctcaaaatgccgccacctcgcccaatcgacgcggtgctcgaccccatcttgccacttgattccggtggtcgcgggtccttcgagtggccgattccagcaccttcggaccaccactcgacgtcgctgtcaagtgacgaccaggccatcgacagcgacattctgtctgtgctggtcaattgtgacgcggaggacgtcggggacccgtcggtgctggactttgcaggacccccctcgaccagcgcgttccagtcgtccaacgcgagcttcgtggagagtgaggacgtcgagatgctgccggtcgggatggagtgcttcaagatttcggaacattcgactgtgccgacggagacgccgacggagtttgcgatgaacgagccggaggccgaattgggcttgagtgcgttcgccgcgctgggagacgactggcacttgtcgagtcatctggagaaaatgacggtggagactccacctgacagtctgaactcgatgtttgggagactgtcggcgggtgaagggactgcaggaaggctgcggtcggcctcggatccggttcatgtagctgctgctccgatacaccctgcgctcagccatctttcatccatgccggtggagcccttggccgtcaaaagcgaagttgctaccgactcaatcgttcagccatcaccaggtgggaataatgagttgctcggccatgatgatagtaattatcaacaatggttcggagataccgccgcggcaggagcggtcaaaccggaggatatcagctcccagcaggaaatgctgtgggcgccaacagaggcgagagttgcaactattggtaacccacagccaacatctcaaacactcgatgaactgctgcaacatgatgacgcagctgagtggaaagccgccagcgaattcgaggccggcaatgctgacgtcaattacgctgggatggcttccacgctgctgtgaaggctactctagcccagcgatagacggcgacccagctacctttgggtcgagcggcttcatccgctgcgagttggcttctctttcgcggtcctctggccacgagaacgtcagcgtcaacccccgactcggagcgcgagagcagctaactcgacttttctctttgctataggtgtgagatcccgggcaaccaaggcgtgtcgagtgtattcgtggttgtcgacttgggctctgtgtgtatactgcctgcatagcgtattctttttcttcgatgtagcggacgcggatggaaaatcgtggagggcagcgtgataacaactcgttgccaagtccggttgtataggcaaatcgtgccacccgcgcgtgaatgtgttgaaacaagagacaacaactaaaacctgcttggatgttgctcatgttttagcgcactgtcttctatttacgccaagtcaagtgcccctcgagcttcaagcgtcacaaggtcgactcgttggtggcgccttttggtctcgccgatccaatagagctcatggctgctcgagacgatgcttcttcttcttcttcttcttcttcttcttcttcttcttcttcttcacgcctaaatggagcctcggagaaccctcgcgctccagtgcaacagcggctacacgatggctttcgtacagaccgtcggtatctgtcccaaatggtgctggaggcccaaaacgagcgctgggctagagtagacgctgtgttggagctcaagcaagatttagacgcgtcttcagcgagaatcgccgctcagagcgcgacaatccaagcccagcaacaagcggagaagactcaccaagctcgaacgcaccagagtctgctggaccagggcaagaatccgtacgaggtggcgagacgcaacgtggtgcagcgagaggctcgcaaggagcgggccaagatcgagcgcaacatccaagaccgcgagacgaagctgctggggagactggagaatgagaaggttctccagcgacgcaaggagaagatcgaggccgagaatcgcgcgtatgaacgcaagtaccagcgcgaaatggggcgagcggcgcaggaggagcgcaggaacgcgtatctgctgtctcggactggcaaagaagcgctggacccgacgggcaaactcgtgcgggtgtatccgtcccaagagacgacgatcaaggactacagcttcggcctcggacgcagcgccgtactgagtcccgaacaccggcgacgcgtagttgcaaaggttttatcgaaacctgctcacgctgggacggagccgacttccctcctgctgccacgaaggagaacgcgccacacgcagcaagagttcgaggacccgacgctgagttcggggcgatccgagaaggacgagaacgaagacgccgagctcaaaacttccgcgagactggtcatgccgccactgccaggtgttaaacctggccacgaccttcgcaaagtgaaccacgcgctgctgccgagtaacgacgtcaagttgcctccgattccggggaaaaacgctcgtcgagctcaagactctcggctcgaagaggaggacaacccggcgtccgaggatgtctctaacccgataaagctgacaaagtctcgagggcgtagcgtgttggaggagcgacaactggcaaaggcccgacaacgacagaaagacgcgagattcgcgcagcctcaagtcgtctggggcaaggcgtttacggggaacgcgttcctcgccaacccttcgacgctctggttcaaggactttgacgtgggtcacccgctgacgctcagcttcacgctcacgaacatctccaacacgttcaaccagttccgactattggccatggacgacgaagtgctcgagctctttgacattgtgtacgagaagccaggacgcatgtccgcgggcatgagctgctccctgcgtatgacgttcacgggggtggagggaagagatttagactcaactctctcggtcgcagcccccacaggggtcttccagatcccagtacgctgtacgtgtaagaaagccgtcccagtgctaaaccagagagaggttcgcttccccgaagtggtcgcgggtgagcgagctacagtctccttgacgctggcgaatgatggcgctctcccgctggaattccgagtgcgccgtgttccacccgcttcaaccgacactccacggtccgtagctcacgtggatgatctacacgccacggaaaaaggagaaggcgttaatgcgagtgattatgcagacgctgctgatcctgaaaacttactacaacaacccaacgccagcgagaatccccaagaagacaaaggggaagatgccaagggatatgaaccagctcaagacgctgcggacggtggaaacaacgatgatgatgtcggccagcagtcaacacctgcctctcgagccgctagtgccgcctccacgaaatcttcggcaagtcgaataacgcaagtcgacgcggttgagccagaacaacaagaagaagaagaagacgataatgacgtgagggaccctctgactgcagaagagcgcgagctggtcgagcgtgttcgtgagacgacaaggttcaaacctgacggggccgaggagcccgttcgtttcacaagacgcggagttgtcgagccgtattccagcagctccgtgtccttcacgttcgcacccgcagtagcaatgaagctggagagcgagcagtacgccctcgagttcccagctgcttcatcttctggactttcgtcccccgatctgcgcaaactcgcctccatctgcgtctccgtctccggcgtcgcctcggaagtcccagttttcgtcgcccaatccaagctgaacttccgctgctgcgcttacgggaagctgtaccgccaccagctcgtcgtctgcaaccgcggcaaagtcgcgctcaagattcaagtccaagtccccaaggttctggccaagtacgtggagttcaaccccagtttcggcttcgttcaggctgcagtggcgtcgcaggaggggaaattcccggtacaagtcaagtttcgacccgaagagggcatgtggaggcgcattgagcgcgccggactgggctcaaaggatttggggatgctggcagtccccattcaagtcgtagtgcccgaccaagtcgttccggtcttcttcttgctgactgcgagactcacccccacgactctgcagctagacgtcaagactgagaactctgaaggtggactgcactttggctcgtgttgcgtcggacacagcattagccacgagctgatgatctccaatgcagcgcgcgtgccccagcgcattggcgtcaccacgctaccgaaaaatgtgactgtaactgacgtctctgcgggagtgggggttgtgctgttgcctggcgagactcggacactgcgagttgtgtacgagccgagctttccaggttcaatgaaggctgcgggccacacgtcgcgagcgaaggctgtgctgacgctgtggtcctccacgttcaaccaagagtacactcttccgtgctcagggagcggcgtggctagcgatctggtgttctctcactcggctattcggctcggcgctacgtccctggggcagacgcagacctgcaatgtcaagctgaccaaccaatccgaccaccacacgcgcctcgtagagctgcgactgccgcctgaagcgactcctttcctgcgaattaccccgttggtggcgtgtctggcaccacgtgagactgtgcgcttggagatcgacttcgagccgacggaggacatcttcaagcttgataaagcgtgctatctcgaggcgaagactgactcgaacagtgctttcaatgacgggaatacgtctcacataacctcagctagaagtgtagaggcggatttgagtcctgacgaagcctcggcaccgcttagtgaccggccagtcgaagacgttgatgcaaggccggcaacaccgacacctgatgataccattgggcctcgaagctgtcaccacacttggactgtcctgtgttttcatcagctcgaggcgactgcagacgccaaacgatcgaccaaagcggagacacgaacaccattgcaagctctcgaggtgcgaacgaccgtgactgagccgttgttgaccccgtccgacacgatgttggacttcgggcaggtggcgattggccaaatgctggtgcgagagctcacgctggagctggcagcaagagcgaccgacggtgtgttgctgcgcgcccaaccgctgcatgtcctgggggcattccgagtaattggcgccttgcgtgaggtgtcgtctgcccccggcagtaggaagaagcgtactattcgagtggagtttgagccgcggacgcctttgatctacgaggacgagctggagctgacagcgctgggcgtgaatatccgggttcggctgcgtggagaaggcatcaaccccagcttaaccctcacgcctgcagacgggagcttggacttccaggacgtgctggctcgaacccgcagcgtgcgtgacctggtgctagcgaacggcagcgccttcccgttggccttttcgatcgaagcgctggttaaagaggacggcgactcgatgacgacttccacgggtttaccggtgttcacgttctctcctacgagcgccattatccccgagaacggttcaatcacggtacacgtggggttccagcctgaccaccagagacccggccactacgcgaagaagtaccggatcaaggtgccgaacgagagcgagcagcacgttgtgagcgtagccggtcgctgctgggagaaccagttctacgtattcgcaccgactgtagacacttccccacttccaagtgaccttgaagctgagatagcacccaagcgaccgccgctcttgacgcctcgtccagtggaagatctgtttgacttaccaccgagcgttccactgagcctgcttcctcacaccattggagtgggggaattgtcagccacaggactccgcaaacccgtatcctccttcatcctcaccttcgctgaggacaatgtcgacggtgatagtggcgatgctggacggttcaccaagactctgttcattggcagcactacaccaagcagcggcatctacggtggactggatgaagtgccttcaggatcgactgctgctaacgctaatgctggcggctctgctggctcctttgagctcgcggtggacgttgcctcgccccatgccaagctgttcacgctcgagccagcgcgtggagccatcgcccctggccaacaactcgcagttcaagtgacgtacgctccgccagccccaacgactgcgtcggagaccccaacgcctgcgagttcagctcgatcgacggtatcggctccagcgacttctgctcgggtcaagtcagcccagcgtcggccggagctggaggtggtgcagtgggtgcaggtgcgagtgcagtgcacgctcaagggcggaagcctctggcggacattgccacaagcaggaggggctccagcacaattatccgtggcggcatctgggacggcagcagctgcagccggtcaccagaaaggagctgcggcacatacgggagtcccaccagcttctgatggagcggatacgcgcattgtcacagtgattttgagagctcggctagaaacatagcctagtttcctgtttgaaatggagatacgcgatcaatgtagacgtgtattttcattcatttttgtatttctttacctgctgaacatgtgcgtaccgacttttggaatgtttatggaagcgaaggatggcgcaatatatttggtttcgatatagtccaggagcttgggatacttgtgctaacgacaactcgaagattcaagcatttatattcaagcgccagagcatgacgctccatgggcagtccgagttcgacgtgttcgccaagcccgtcgtgtcggccgaaggtgccagtgtgttctacatgtacgatggctacgccaaattcgtggagggagacaagacgctcacgtattcgtacgtgaatgacgctgggcatttgcccacaaacgacggagagaaacagaacgccgagtgcatttcatcgacgacgctgccattccacatcttgcctgcgctgaacgacgcgacgcccattccaagcgcgtccataggcgacgaaggcgtcgactatgagagtggcagcctcttcaagacaacgttcgctggagctcagttcgctatttgttcgtcgggtaaggcggatttcacggcgtacagcagcgactttgacattaacgtggagtacttggactcctccgtcaaggttgaggaaccagcgctgagtgctggagcgtcgtgtgctgccgtggctcagccaagctccgtgacgcctaatacgctggccttgctgacgggtagtactattccactcggtacttcgaggaagctgaagaccgcagaggacatggccatggaagcgtcttcgtgcaagtgcaagtcgaagcctcgtccgtgcgtcttcttccacggtatcggcaaccggaacgagatggaggagctgcaggacacggccaagaaggccagtggtcgcatgggcaacatgaacaagcacaccccctgctgcaccgaggtcaagtacgccatcttgaacacgatggactatagctggactaacgacacactcgagcaaaagttctgcgatcgcgctctcagattgagcgacactagcgacgcagagctgggaatcatccgagacacggtcttggtgacgcactcgatgggcggcctcgtcatgtcaatggcgttagctacgggcaagtgcagctttggcgagggtacaacgtgggtggcttcgagctcgcccatgctggggagtatggcgtcggactacttccaggattctgcaccgacgagatcagtgaggtcgtgaccaacgtgttggagtttatcgggcagtgccccatgcctctctcgcggcagtctattttgtattacaaggacatatacgcgtccgaggcgctgaacgcggcctatgaacttgctcaagaagcctacagaggcaacgtgagtgctgccatgtgtggcgatagcccgaatggcattttctcacgatacgagtgagatacgaagccatcatgcttatcgatgctaaactggtcccgcacaagtctccagagaacgacgcccttgtggagttccagagctgcgcgataggcctcgacgaatcgaagtttggcaagagttacaaggacaagttctacaaaccggagctgaatcatgcagacacggtgtttttgactggcgatgggtacttcaaagactcccagaagtctgtcaagtggttcgagtgtctgctgtagaaaacgtgttgctttttgcttcgaagtataacataagaaatggatttggccctgtatgattgtggtcagggattgacagtaacacgattttcttctgaattactatagtcatatactagtaatggagcatctcagtcgcgttgctccgttgagttgcttcgggggtcgacaccctgcagtggagtctccacttcaggccgacgtccccaccctctaattgatcttatcaatcaccattactattttttgtagtgtagtgaagcaaacttagggctaagggcgtgttcgcgaccgttgcaatttagagtctcagtttaacccgtgcaggtcatcaaaccaataagcaattagcaacactggtggagctgcacgatgaagtcttcattatcagcaaataacgttactatctatcgcgaggtcaagataatcaacgccaattacataccagcagcaagagagcactattaatgatgctggactatatctcgcgaaaccctagatcacggttaatcgcaagggtgagctgcagcaccagcggttcaagatcaattagtggtagccgacagcccaaagcaaaatacatgtagcaagggataattgttgttaaaagctataatattcagtttcgattttccagcgtactcaatacagcatctcggctcccgatgaccgccgtacttcctctagtgctacataccatatcacttataccatatcacgtaccggtattaataacactatttaaaattattacactatcgcaagattctctattctatcggcagcaagtggttgcgaggagcacagccaaagcaaacccgcgcggggtgcccgtgaagcatgtccgcgtaggagggcccagcaaccagcagggcagcgaacgttgcggcttggagctagttccgtagtgtggggtgcgagcccccaaggtataaggagactacctgcgtcactgccaggagctatctgtaggctacaggctgtagcttcacagagtattggacatggtgagctttgcgtagcacgtatccatgcaggcaagttgaagtgcactctcttttagcaattctacccttcccagcactaactcactcgtagtaatggatgcaagcgctgacttggcgctctaaatcagagtgaagccgaggacttggtggcgttttttttgcgctcggtgtgatctaaagtgtagcaatttatctaaacccgcgattcgcttcccgatgcctgtttgattagcgtttatcgtcgaggctaaatcgtgtccccccactttaatggcatcgaccccttctcagaaggggtcactccagtttttacgcagttaagcatgtctatggatcaagagagggttgttcaaccgaggttttttgcgcaatttttggccccggggaagtgattctagatgtaaaccctaaccgttcatgtctcagattaagagaggtaagtaaagagaggtaagaaatagagtaaagaggagtgatagatgattataagtggggacttcgtcgccaactagtagaagacaacaggatactatagtaatagtatcatcgagtctaggatctcgactactacagtactattaatgcattataacttagtacttcctagtaatttcgatgatcgatcttcaaaaagcctacatctttgtcgctgcacgcttcacacattggattcttcgttcaaaaattcttcgtttgcgagcatgaggtgctggttcttattcaaagttaaaccatcccgttgagaagcatcggtcgattcctgaaaccactttagacccgtctaattgattcataatatgtatatgtatttaataataataatattattatgcacttacctctctaagtggctcccatataagctgtgcaacgtggggatcattccttcgaagggggaattaagctcacgccaccaaagcaatcttgaccacttcaggggatcggggtttgctgtatgcgggactgacacgagcaaagccagcgtatcaatgttgtgtacggtggttggatcagtggccctgcacgtcgtaaatcttcatctctactaaatgggattgtggccaaacctcatttggaagccgaaagattgacacacacgccgctaaattccttcaagtgcgtgacagtagtcagcattaataaatgtggcatatctgagttgggacttactaaagctacgtgataaaattgctagagctacttggtggtacccagattttggtactcccagtcggttgctgtagaacgaaaatgcctgtaaccatacttgggctacgatttcataaagcaattcgctaaggcgcacgacaagcaaacacgtcgcccgatcctgtcgtaagcttcgctgtgactaaagccattctgctcgctaacctcaccccctgaacatcctgaatgcccaaccgtctccttaccaggaaaagggggctacggtaaggatactcatcaagtagccgcaacgatacacccaaaatgagagcacgtgctcatatacctcactgccatacacgcagcgcatcaaagctccgaaagcaagtccctgttctgccaacgttgctgagttcgctgctgtttgcccacatcacgctgctttgctatacatgtagctgttcatcagagaacttagcatctagctgtttccgatgtcacctgtaggcctggcgggcatcaagtatcgttgtcaaggtgcaagctggatggcaagagccccttaggccttgaacattcttcagcatcagaacggctagagctcccgaattgtgtaccaaaatatgggtaccacccggtagctctagtacttttgtcacgtagctttagtaagtcccatctgagttattgtcgctttcaaggattttgcgcactctattcgtcttataactcgtcttcgcggtgtcacaaatcgttgtgcattgcgatcaaatcgttgctcaaagcgcgaattagctgtgacgaccaacttacctagccaaactgctgaatgctgaagtacttgacgcttcgagagtaaaaactattccccatagtgcagcgcatagcgcaggattttctcgtcgctgcatacaaatactccattgaaaagctaactaacacgcaagttgcagcttggcgagttgcaaaaacgaatggcggatggttcaaccgccattcgttgtttttcatcgatagctcgttgcgcttctggctattcgtccttcaaatcactgaaccgtgattccgcagaagtcgtcctctaaatcgtcaatatttaagtctctccgccaaaatacatgaaacgcacaatactagttactgcagtagtattagtcggctcatcgtcccaaaatactagctactatattattagcatcattacaatattgatatcaattggatagtagttaaaaacaaactactgtcaatccctgagcgggtgtttactgtattggggcgaagcccccctataatcacgtagcatatttattatgatacatgttactgttaagattgccgcttgcaaatactttgccctctacgagaactttaagtaggctgggatagctaaggaacattgggtgaggcaaactctggactgcggtacagtgcattgtgtcttattcggcgaggcggtgtatttaaacaaagttaagtagttggtgtctccccgacactcgttttgaattagtacgtccgttggataagttaaatgatcaaacattttggcgcattgcagtggaaagaaagacatattgattacggagttttgtttggatggacaatcctttgtgctcgttgtctggcgaacggcgttatggaaaggtgattacaatatgacgacagctcttacagcacaatagcaagtgttttctacatagcaaacgccacaccacgcaacacagaggtagtatggaagggtgcttgctatgtaaaactaggtttgcggtaaactatctgcgattaattacaaaagttaccgagcggaatatcacagaagacatctagtcttaaagaggctgttggtacacaccaagcgtgaaagaagatgaaaccaggcgaccttagcagcggtgctctgttggcctcaccgctaccgcccacgaccgacgcaggcacgcgcctatcgcgagctcatagggcaaaggtttgccagggtctgttgatgtctagactcaaagcaattgaggctatgaaaaacagactagacaagatcaccaagtactcgtttaagcttttgaacgagcgcgtcgatctggctacgatgctcacggacgagaaggaggaagctgtccgtctggcaacggtgctttgggtgtctgggcgcaaaaccggctacatggtgtcgtacggtgtaatgctgcaacagtgtttggaggctctactcgagcaagactagaccaatacttcgcgcgtgttgtggacacgaagaaagcatcaagctgataacaaataaaactgcgttgtacagttgccatcaactcgaggtcgtttgcatctacgaccttggctacttggttcgctattgtactcacttcaggttgcataagtatcatccacatattacgtagtcgcataacggcaacgtcatcggctgaaactgtggccttggtaaatcggaagttatccttcagcatgcaatacacctgtggtatcaccataacgtcacacgacgttccatcgggctgtttaggcgcatctagccatacttcattctccacaacaggatattcgaccccagccattgtcttctcattgtcattgccaacccagcagaaattgcgctacggtctgttcataggtatcttcgactgtagcgataactcgaatcgcacatcggctcgtagaagtagggtatgatcgacgatggttcagtctggtacgtgatgctaacaatgacgacgccccagtgtatgttgctcagataaactttcgaatcaacataatggatgctcgaaatgcggatctggggcggatcaggacagcgaaacattgatgcacacgaatccaatgcgtagtaatcttccagagagtcacagatgcaccagatagcgaaatcggtgattgtatcagacagcatctcctttcgagcaggcatccccactattccttgtgcggtgcaccttaggtttcttgggaatacgtagcgcctccaggatccctcccttacttgcaacttttgctgccgtttttacacgtacagcagctttggtagagtagccctttttcttcgaggacaacaacgctttggttgggtacagcttcggtgtagatgacgacgctgctttagttagaggcagatgagagttgggcattgacgccgacttagtcagtgtggtaagaagatccgctcaagaatggtcttgatggaaccggatccgccatctcacccgataatgggatccggcagttggtgacgatgcccggtccctcggatgacgccgaggttgctagatggaggtgtggttgccggatcagggcagttgaagattgatcaggtgcaagtggtgtggtgcacacggatttggtcgcctacattaggacctcctggattaggtatggatctgtaccaagttattggtacagtggctatgttagtgtaattaggcaagaaggaaagccattcgtgggtaggatccaagccggatgagaaggttggatacaggttaccataaatcagagtcgaaattgcttgggaaccacacacttggtccttagtatttggattagtattggtccatactttaatcaagtgatttgtccccgcacacgtggcagactgctggatagcttggccagcagctcgtgcccttcggccctcgcccctcaactcccccgctagtaggaagtggcaagcaacgtaaaagaaaatgatacaacacccccaacaaggcaacaactccggatctggtatattacttatcggacccacaagatctactacggccaagaccaaggatcaatctacccagacccgcgtgaaggaacccccactgcggatctaccccatcgtctccccaagtccccgccaaggacgttcaagctcacccgctgcgcatctcgtgtcaacgagagcgcagatccagcccgacgacgggtacacaaggggagacacccagcaacctacggttatcggagtactccctccgttagtcggtgtctgggcgcagtgtgtgagtgtgggatccctgataattccagcagatccacccaccacatcagcatttctccactagccgccttgctggatgttgccgccaacattgcttcgttgttttttgctgcggactctcgcttagagtctacagccgtgtcggtggaccccgttttcgcttgctccaactcctggatgtagttcatgctcaaagaaatctgccgaagtgatgtcggatgaggtgtcagatgtgtccggatcgtcggattcttcgctttcgtcagggctggtagtagaatcagcatcgacagtctccaatccacttcgaacaatgtccttccaggtcttcaaggctgcgacgaaagctggggtagccaaacctgctaggtgctccatcacagactcgagcacagctttagcatagcaatatttctcttctaataagagaaccacaacgttggcacgctcacgccgatacatcttgacgtaaataacaacacgttgcttttgacggtggcgttcgaccttctctgcggtttcgacatcacgctcatagtggggtgctggctgtgttgctctttgtgttgcttctgttgcaccttatgttgcttcgggctcatccaggaagacctcgctttgggtcagaccgtcaggaatctccagcttctttcatggacgcttgaactgcttgtagcgctccgacaccatctcgaaggtctttctccagctcggacattgcaaatcacacttgtactagatcgaagttttagccaatcgcgacacgaaaattaggggcgcatatgtatttcgttcacagggagaatgtcataatgtattttccaacttattgactttcagcattatttattttccaacatacgctccctaaatataaatagtattttaggaagcactgtgcgtactgattcataccagtatcgtcggtagcacaccgtttccatctgcccatgcatgtaaaccttttggaggacccagtgcggtgccggagtcgtacccgtttcaaggaaatctaccagttagatgtcaagaggggtcaacgtttgacttgatattccacaaatatattcctatttggtctgcgataacagcaccaacgttgcttcctatcccagtgtaagcatgtgttggacaaaatatctgcaaacggcaataacttacttaaccctatcgttaacgccatacatttctgtttgaagggacaccatacaaactttaagtaaaacggggtaaaatgatgcatgaggtatcattttgctgtagtaggttttcgaggccaacagatcaaaagtatacgtgatgggaggtttgaagcgacctttcgatcaaaaacatacatgagacatcattttactgcttctctgtgattcgctgcgaatcgacaaaagtatcagtggaagcagtaccgtgagaacagcaccctaacaaaatttcagtaagagcagtaccgtggatcacagcgccctcttgtggattatgttgggcttttcctagttgtgaagcggcggcgccgtggtctccgacgcgacggtggcgactatggcggctgtcctggacctggccggagcgtctccgcctgcgtcgacaagcacgcgatgactgcgggcgtctcgggcagcgggcgcaatggctacgggagcgccgccagcaccgtcaacagcatggtcttggaggcttccgcggcggccgtggacgtgttggacgtgatcgggggcgtctccgctggcgtggtcacgaacgcgacggtggcattcggctcgggcagcaagcgtaacgacagcggcagtccgcacgcaggttgccgccggtagtagcggcagcggcgtcgccagcgacatcgacagaaggtctcgtacacgatggaggtgacggtggtcttggtagatgtgggcaggggcttgccggcatgggtatgcgtgctggcgcaacggatcaccgtattcagacagctttgggtttcgctagaatgatcaattcacactagaagaaacattacttgagagattacattcaacataattgcatattgctctgttactagggggaggacatagtagcttcagtaacgtgctttcgccttggagcgtcctgctccgcgaatcaactggatatcacccatgatagcggggaggtcaaaaccagcgcggccttagagcttgtggtgccaagtcgagaggttgctcttgaagccattggggcgagcggtagtatgcgcgcttctcgcaagagcatgtccagtgagcttgatccttgagttggtccgccagcatatcgactatgtccatagctgtggctagatcggcaactacgttgtagtgtttctgcaagtcaaggccttccttataatggttcatgagggtgtcttgtggcgtggaaggttccgcctccatcgcgataaagcgctcgatatgttcgtcttgctcctcgcgataccgcaacaagttggagtttataaattttagacgtgcccgagtttgcggtcgcgtgatctacattttcatatcgaatacagacatagatatcattgcccgtaaccagccacgatacaacattttggcttacctcagacagctccatgcacgtctccagccagcgcatcatccagataaagttgtgcgcacggtcattttcaccgcgataaatcgccacgtagaggtcgttcatctctttcacgggcagtgcaattatgaagtcgtctatgtcgatcgacgtgccacatctcgcttcggttctctacaggtaggcactgattagctttagccaaacgttattgcgtagctacactaacttacccgctctcgcccagaaggggtcacaaatactggatacagattgtcgaactccagttgctcaccggcgctacacaaagccaaagactatatatgcgatgagcatcagcacggccgaaacaatgtcatcactaccatttcaagcgtcttggacgatccataaattcgccttccatcgcttgcatgcgtcttcgttggtcctggcaactacccatacatagccgttcgtattagcactagcataacaacacgatgccgaaacagccaaaacacgtatccctactttatccgcgtccttcctgcgatcaaccatctttccacttgagcgcagaatctagaatgataaagtactagagatcagcgttgttgggtggatatattggaccgaatatattgttatttgtatggccatgttcgaattgttcaaagggaccgaacgtactaggctttgtatggggtggttcgactcatcgttgtatgtgatgttagtatggtggagtttgaacccaccggtgcacgttcaatgcccgccatgcggaatgcagcgtagctgtgctgacaaggtaccgtgcaaaatgcatcggatatcgagtgcggaatgaatacagtgtaattacgcagagtcatgaatagtacgagtactcaaagcgttcaacggtaacatacggtacttagatttactccaggcatattgctaccaaatgtaagtgctgtagcggcttcggcatcgtctctagagttacgttgacccatgcaagccccatagtgacggtccgaaccacggtacacggcgacagtggtgacgcccatcgtagatacactgctgccaagtgccaatgctgcctacgcgtccctgtcgatgggcaaattgggcgcttgcgacgttgtcgtcatggtgacttcaggctccatcttgacccccgatgggactcgaacgcatcatttctagcagcagcctctcttgatctttgtcgccggtggcaccccgctccctcctgaggcatctacgtgcggttatccgtcgatgaggatcgctggaagcgaaaaagggcgggagaacgccgtccacctgcaggtctagtgggcagacgtccattgccgcctccgacgctccatttcggggtcctgtagcggaatctcggcgtctcgcagctgaacgtggttgacagccacacccggcggcaatgccgtgaggagagtcgggggctacgggaccaacgacaccatcccagcgccagttctagtagcactgcgttatcgacaacaaatgcgctgttgcggcggttgtgcgggacgtggtcgtcgggtggatacacgacggacagcgagtccaacttcatgcccggtgcgtcccgaggtcagcgcgtctagtagcacaggcggtcagcagcagcagatgcgtcgacgcccaggcgctgagcgtgtgacgactctaacgacgctggacttggtgagtgaggggcgaactggcaggctggacttgaccgcagcgtgcacagtatcacgggcagccacgcgccgtaaacgatgggtacggccagcacatgtgtaccaccgtcgtccgaggcgtggaaaccggaagaacggagcgtgggcagccagggacacttgggatcgagcttgcaaaatcggaaatgagctccgatgcgagaaggtcattttgattcggagcaagccgagcaagccgaccaaacaacagtggatcgatttgaactaattccgccaatcacacttcttgttgaactttggcagccaatcactgtcatcgatttttcggagacatgttttgattggtcaaagcgaagacatgggaaaaaatgtcagcgcgggaaagcttgaaaagatcaaccaaagcaaaatgggcaccaaaaaggcgcgcctttacatgttgtgtaaaccactgcaaataccgatagcctatttatgtaacattatgtatagcgaccgctctacccgttctccctagccgaaacgtcctaccatcgtcattcccccaaccatggtcttggtggacctggtcggaggcgtctccgccatcggcgacacggacacggacgcgatggtggcgggcgactcgggcagtaagcacaacggcggccgcagcgccgtgtgtgctgtcaacagcatggtctcggaggcttccgcggcgaccgtgaccgtgttggacatgatcgggggcgtctctgctggcatggtcaagaacgcgacggtggcattcggcgcggttgatgaggctaataggggtgtcttcgtgttggctgggcagcgccacgagagcgtttatagcagtggcatcgatagccgggcttagttgccttgcttgcggtaggagcgtcttgaatctggtgttgaatacattggtggggatgggacctttgtaggttatcaggcgaagaagtatgagaccaaatatcttatggtatgtatggcattatagatttatagatctcgtggcaacccgatggcagacttctcggacgaagaggacttgctgctttatcggctggcaaaggagcaggttgatgcaggccgccgaattaactggcggactgtctggttggggatggcatactgcgggaagacagtttcagcaatactggcagtcattccaacgcttacaatcgccgacacttttgttgactttggatctgggatcggcaacgtggttgcacaagtggcattggagacttctgttggatgcatcgggattgagttccaggacaacttagcaaacatgtccaagctgctaattcgtggcgcacgcgtggatttcccaaatttatccaaggtcccgattcacgaggccgacctcagagcgatgagctcagccgtacgcgaggatattgacgggtgcagtgttttatttgcgaacaatatcgttttcgagcctacaagttttgcggcgctggaggactttgcatcttcagcagcaggtttggtccacgtcgttgtcatggcaacaatttgcggccggcaccgcccaacctgcccgcgcaacttctgctctgtctggacgctccgacggcgtatcgacgttcaagtgtcttggtcttcccagcttcatcatgcatactggtacaccagggttgtagagccctacatctaagtacctcacgcagaatggaaagggacattcaatatacttcgtttgtcagacttgttcatccaactgttcattacctgtcgggccaataacatatatcagccattgtacacatctacatcaacgtcttgcacggacatcgtagatctgaccgcatccaccaaggtcacggtcacctccatcgcgcctgaaaacctgctgtcgatgtcgctggcggcgctgctgccgctactaccggcggcgacctgtgtgcggctgccgctggcgttgtgctcgatgatcgcgtccgtgcccctggggacacaatagtgctgatagatatactacagaagacacaatagcgtggggttttacctatccctcttagctgtatgattggtcataaacggcgaggaaactgccgttgctcagcaaattgctgtttcagttatcctgcttctactatgaccaaagtaaaaagatacttgatgtatcattctggtaacgatagggttaagtactatgtttactactcctatttttctttttaccaagtggatacatcaattctgtgaatgggttagaatgaccatttaactagaattacgtacagggggccgaaaaaagggaaatcaccggctttagcatcattttgcccgttatcatggttacaagaatacccttcaattccgacgcgaagcgacgtctcattcgttaaagacagtaaagccaggattccgaattagcgtgaggggaaatctgaggttactacggcgaccctccaaaaagcgctacaacagcaaaagttgctttccataagctcctatataagcccctatttcacgaaaatacttgttagattttgttggctcgtaaaagcctcgtcatacgaagttgagcttattctgacctgaaataatacctcaatagtagcccctcgtaggtactacatatatcaagaagtttgtatggaaatagcccgaaccctatataacgattgtcggccgccttgagacattgtttcggtctgaggatgttgaatctctgtattgggaatttgtacgggccgtcaccagaagcaacttaagtgttatttgatcagtcagggcgtgccagtaccaagattacattttactataaaagatcatgatcagcattttttgttgatctggacgaaactagggcgacgctaaggctgggatagcaattttacgggggctgccagggctttcacgacagcagcagtattattacgactataatatcaagctgcgcgagcgcaacttcaaagtttaactagccaccgcctcttttgcctagcaagtaagaagatcagctattagcctcgtgaccatacctttatgagaaaacccggagcgttataagcgcttagtattatagttaatgctgcgttttgttttctttggttcatttttcatttcttaacgctgaaataggccacaacttctattatacagcatcccagctgcagcattgccaaactttacggttaacgcattaggtttcccgacgttcgagtgggccagtaatgtagtcgtgctgaaatttttaaattcaaattagaagcccttaaaagggcttctaacactctcagggctatactacatacatagattaagtgtatcctgcgttgtggggtcttcctcgttgtggagagattggtgccgggtgtaggttgcggttgtaacggggttacacgagagttacccgaagggttacgaagtgggtacacactgtctaacctaaatcagtagaaaaatcagtacatggcttcagagtcactgactatgcatatgactagggttcactatgctagatagtgaaccggatacatttacaccgtaggcggctttgccgcaataaagggaaatacattcagtttgagatttacactgaagagtctagggttgactcttggagtccgtagggtgtacggactcgtacgttctggtattagaacgggcgatcttaagctgagactctgcgagtctgttaagcttcctctgacgcaaagctacggcagccccgctgcacttggtagcacttgaccgccagggcccgcgccgttgccgcagcgagcgccgccccgggcgctaccggatcgggcagcctgccggccacctgagtctgtatagactgaccctctgtggagaatggagcagttcgctcacttgcccccgaaccagcaggatgcgcttaaaaagcttatatccatgctggatccggagggcgtgacgcaacttgcgcagcaaggcccctacgcggtgaacgcgcgtctcgaggcgttttcaagctacgagaatgctcttctagagcacctccagcaaaggatggcgactgccgcggcgccccaagcgccccctgcgtcgtccgacgcgggaacaagacccatgccgctcatgttgagcgtgaagaccttcgaaggcaaggagggtgaaagcttgatgctttggacccgtgaggttgatatggctatgagctcagctctactccgggcggagtcgcagcgagtggcactagcaatctcgaagctccgtgggcgagcgagagagtgggcactaacgtccgggacgtcagtcgaggtggccttcccgacgtgggatcagctgaaacagcaattgccccgagtgtttactctgcctaacgaggcgtatcgcgtgcgctcacgcttcctggcgaccaggcagagcaagatggagttgaaggactatgtccaagagttgagaactctcattgctggcatgtctgcggaccccctgccggaagcagtcaccgttacggtgttcatggagggcctccgcactggcgttgtcaggacggaggtattccgaactcacccgagctcttttgaagaggctgtgagcgtcccattaaatgcggaacacagctttaagtcgtcgagacttgggtggaatgcgtcttacgctagcgcgccgagtggtccggaacccatggaccacaactatgctgaagatgaacaagccgagcttcgtgctgctgagcagtgtcgtggtatcggcagacgcttcatctgtggtgacatccgtcaccttcgtgctgggtgtccgctgcgccatcagcgccaggcttcgtcaagccgctcttcgagttcgagccagggttctggtttgtctcggggaaacgagaagtcccagtaggcacggggcggcgtactggggaagaactaagttctattgagcctcggcaaggtggaggtcgacaggacttagccccgaagagagccgtactctctaacacggaacgtgaatgcaagctgggcttgctagttgtccaagcttgggtgaagggcttcacgaagccatggacgattttgatcgattcgggagcgtcgggtaactacgcccgacgttctacgatggacggaagtcagctttatgctgaggcgctggtagcgcgcgggagtgacatcgtcactgttcgtctcgcgacgggcctaaggtccctgtggacatgggcgtgaagtttttggattttgatagcgtgaaacgctgtccggtcttagacctcgattcgagatatgatctcatccttgctatggcgtggctggaacgccacgagccttggatcgattggaggtcgaagacccttgctgccacgcacttctctcctggcggagcattggctagtcatgaacccacctctgctaggaagcagaagctttctggcgcgagcactggaccgagtcggtcaatgtgctggacatcggagtttccgagttggtggacactgcgtgtgtcgagaacgagcgtttcgagcgtggctcgcggacggcaggtggagcggcacgaattccgctgagcgggtgtgcgtctgagggcgacgccctgctgtattcaagagaagacaaggtcggcatgaagccgaggagccatgggcgccgcccggctgttgaaggatgtggagcggcactaattccgctgagcgggcgtgcgtctgagggcgacgccctgctgcctgccagcgacggcgcggtcggcacgatgccgaagaacaaggggctttgcccggatgaagatcgtgaagtggcacgtaatccactgagtggaggctgcggatcgtgcagctcttcgctgagtgtcggtaaagacactggagctcccttggagctgaacgaggtagtgacacctggcgtcaagacgcacgcgaaatcacggagctcttcagggcgggcggtgtccatgaagaggaggcagcgccgcaaagcgctggctgcgagacggaaggcgtctgcgatctcacgagtcgagaagggcgtgtcgagcggtgaggctccacgcgaaaacgagcagctctatacactcgtgaatggagtgacgggcgacgtcgacggaggtatcaacctcgacgacttgccctcactgtctgctctcctggagctggacgaggtgtccttggccaagttcggcgaagacttgaaggctggagacttgactgaggtagtggtcatacgacccgaagaagagttgaactcgtcctcgcttctggatgaagctgtcctggaagacaccaagaaggcgctgaatgtgccgagcgtatcggcgatcctgaaggacccgtcggatgccttgtatcaagtggtaaaggattaccaggacgtggtctcgaaggagccgccctcggggctacctccggatcgaggtgttcgacacgaaatcgatctcgtcccgggaacgaagtactgtgtgacgaggcagtggcccttgccgaaggagcagtgtgacgtcattggcgcgttcttccgtgcgaagcacgaggcgggcatggtgcgtgagagtaaggctccacactctacgccgatattctgtgtcagaaagccgaatggcaagtggtgtatcgtgtatgctttcaacaagctgaatgccgctaccattccggcgcagacgccggttcctcggaaggatgctcttcagaataacatgacaggatgtacgatgtacagtgcgctcgacttggtcgatggatattaccaattgctcatgaggacgagcgacattcctctcactgctgtgagtaatccaagctgcatgctctgggagtggttggtgatgccccaagggctttcgaacgcgccagcgccgtttaatcgtcttgtgacgcagctcttcaggccccatcgggcgtacgcgcaaacgtacttcgatgacatctttgtccacagtcgtgccgaacacggaaagactgatatggagaaccatgtggagcacctgcgtgctgtgctcgaaagcatgcgtcaaaacaagttgtacgccaacattgacaaatgcatcttcggagcgaaagagacccctatttaggctgcttcatcgggaagcgtggcctgagggccgatgactggccggttcccaacaaccagaaggatcttcgcaagtggcttggcttagccaattacttgcacaagtacagcgagaactacgctgagatggctcggccactctccaatctcctgaagaaggatgcggagtagatgcgtttgtggcaattaaggacagtctccttcatgcgcctattctggctctgctagaccccgctcgcccgtttagtgtcgtctgagacgcctcggactttgccattggcttgccctgctgcaagcagacgccgaggggcgcgagttcgtggtggcgttcgaatctcgccagctgaaggctgcggagaagaactatcctgtccacgacaaggagctacttgcaatgaagtatgcgctcgtcaagttcagggctcacctgttgggctctcagccgttcgtgatttacacggatcaggcgtcgttacgcactgcgactcagtcgcctcatctctcccaaaggatggcccgatggctgtccttcttcgcggagtacaacttcgaggtgaagtacaagcctggcaggcagaatgtccttgtcgcgcaggccggactatgagctggctcatgcaacgaccgtgacttcgtcattaccggatttgatcagaacggcttatgccatggacgacacttgagccgcgttgctgaaggctctggggagcaaggagtttcaagactcggacatggaattgtcagcgcggctgcgcgcgcggctacaccgttattccctcggttgaggcctgttgttctacaacaccggccccgaggatacgccccgcgtggtcaccctcatgatgaggatctgaagtatcgcatcctctatgaggcacacgacacggcgctggccggccatcttggccgtgagaagacctacagctcggtgagcacccactactggtggccgaagatgtacaattggacgagcacttatgtgcgcacgtgcgagacgtgtcagggagtgaagtcgtcacctcatgctgcagcgccattggcgagtttgcctgtcccttcgggatgctggcaatccacgagtatggactttgtgtttggtctgccggcggacgcgacgggcaacacaagagtcgtggtcttcgtggaccgactgagcaaaatggctcacattgcggctgtgccggataccatcgatggtaaaggtacagcaacgttgttctagggccgagtgtttcgacaacacggactccctgagtcgattgtctcggaccgagacccccgctgcacgggtaacttctggtgcgcggtctttgcggtgcttggcaccaagctggacatgtccacggcggaccatcctcagaccgatggtcaaacagagcgcgtaaagcgcgtcgtcgaggacgtgctccacagcatttgcgctgagacgccgaagcgctggagcgctatgctgccactcgtcgagtttgcattgaacagcgccgtgcacgcctcgacaggctacacgccgttctacgtgaacagcttgtcccatccccgcgtcccgctgacgccgccacgtggtggcctcgggcttggtgggggaggggaagccgatttagctgatcggctagccgatgtcagcccggctactgttcgtaaacatgttgacgctttcttgtcgacgcgtctaagtgtcttacgacatgcgcgtgacgcgatggctgagagccaagacaagcaaaaggaacgtgcagatgccaggggcagaggcaatgttgaaagttatgctggtgctgcttagcgctaagaacctacctacacatgcagtgtcagccgtcttcaagacgaagttgcgcccacgcttcatcggacctttcaaggttgtggccaagaagggccttgcgtacacgctcaatcttccaagaagatgcggacgcaccccgtcttctacgtgggcttgctcagccgtaccaggacccgatgcaggtgcagatggaggcaccgagggtgacgaggtcacaggcgcggaagtcgcggtcgtcgaggacgcagtcgccggcgtcgaagacgcgaccactccgcaggcacagacgagagtgccgcgggcactgcagtagccgcaagcgcaggaggcgcagcaggggaggcctgcatgcgggccaggagttcgagctgaccctggagcacagcctggtggcgctgtagctccgcgaactctcgagcgtgtcgctcttcgtgatcgcgacagtagttcacccacccgttcaggtgaacgaagtcgttctccaaggtcccaaggcggtcccagacctcccgaggcaccccaagccactccagccgctcagcgagcctgtcgagatcagtcgcacaacgtgccagacgcgcgtcgatgtcgtggacgtggtcccgaaggcgatccgcctgttgccgagtctcgtgcaactcgtcgaacgtcgcgagggggcttggcgcgtcctccaccggtgctgctcgatgagcatgggaatctacattgccatgtggagcgcctcctggcgaagcggcggtgccagggtcaaaaccagtatctggtggaatggcgagggtactctcactccgagaactcatgggagtttgaggtgcccctccgccaggattgcccagacgtcgtggacgcttttgatcagcttgatcaccagcgccccgagggctcaaggccggcacgccggccgtcccgcgcttcccgacaataagctggggatctgctgggtcagccacattgctccgaggctgaccctgagccacagcgctcaccccctcgcgagaaggagccgctggagtgcttgaaggagcgaagcgcgcagcgctaaactgggtctgcggctgggcgagtgccgagaggctgcgcttggctcggaccttcgcgaaatcgaagcggagcttgcgttcaatgcgaacatccacttcactgaagctggctcggagagcatccatggagctgagcttccggctgtgctcggcccaagattcgaactgagcttcgtactcaatagagtcttcccccgggctaagaaccacggggtacgtccgcatggcggggacagacttctgctgggcttggagccgcaagcgctcgcgtactccgcaacagtcgtagactgtggagtgaggagtcgctctcggagagacgttcgtagagcgagctcctgtggagtacgggccgcgggcccaatggcgtgcgctgcgagcgactggcaggaacgcctggcgggcacgcctcagcgggatcacgaggccggaagccgtagtcggtagcgctggggttcagcaagggccgcagctccgggcgctgggagcgcatgggcgccatctgcgctgcgacctgctcggactgagcttcgtccaaggggtggggatgacgggacccaggggcacgccttcgccacgaggtggtaaataccttggctcagtgagcgcgcgcagaggccggaagagcgttcagagaacgggtttggagctcgcagcggtggtcgcggctcctccctcgacggcgcagcgcgctctgcaggtggacggctcggcgagcgtacaggagacgtgtgcgcggggcgctcttgatagcgacggctcggagagccaactagggccggcgagccttcttcacggcgtgtcgacggtgtgggcgaagcgtcgccgcggctcggggagcgtcgcatgagtgggggcgcatctcctcggtgcggagaaccctccatggactcatccacctcgccctcttcaccaaagagttccctaggatccatggtctggcgggttggtgctcgagtagagctggggcttgcgcgctgcgagctgcgcttcaggcgttgcgccgcaaagtactcggacaccgagagcctggaaggcgtcgagggtatgcgcgcgggcgctggcgttcgcggagatgcggaggcacgcagtgcagcagcacgagaggagcgaggctccgaggcggatctcgcgagaggctgtctgcggtcgaaagaccaaaaggctttatgacttgaagtcatgtgagggcgcgttgcgccgagaagttctcagagaagtccacgcgttgtggattgactcgttcgagaaggaggcttgacggaacaagacccggaggttgaccgttaagcgtgaacacccttcatggtttggtgggggagggtgtaacggggttacacgagagttacccgaagggttatgaggtgggtacacactgtctaacctaaatcagtaggagaatcagtacccggcttcagagccactgattatgcatatgactagggttcactatgctagatagtgaaccggatacatttacaccgttggcgacttggccgctgacacgaggcggtccccagaaaattgccgacgatgtgccgtcacctgatgacttggcgtttgtatcggatgccgattggtggatgacttggatacggcgcggctgtacccgtgtgacatggatggcgactgtgggagagaagtgatttctcgggatgaatccagcgcctgaccgcagatgggcccaactggctggaagtgtgaatcctgggagtgcatgcccaggatttcagagaacactcagtccagccgcggactttcccttacgatgagtgtctaaagtctggcggaaagtgtctctggggaatgtacacctcatcttgctgtggctcagagtgccccaaaggatcaaattaccctgagaatcaacccactaccaccaccgcgcaggaggccgctaaatccgctaaaaacttggctttgtggagatacacgcgagcctgcaatgcagcaaacctgttacccagagtgccgcacggaaacccagtgcgccgcacgatgacccagagttcacctccctgagtgcaggtgacccagagttccaaagatgattcgctaggtttggaccataaatccagactctctatactgaacttaagtgtttcccaagccaacacccaagaatccccacagttccacaatattcctcagaattcccaggatttcagaagatgaccctgagtgtcagttgattctcagggattctcagggattcgagtcagttcgcagtcagtctgcaatcaaagtgatgcgtgaccttgaagaaccgttgtggatgcgcagactggatacgtttgaggggtcgagagggagtcctgtaccatactaaaccaagtctaaggacccacaattggcactttcgacgccgtgcgacgatggattcgcaagccgatcgcaagtttgtaccgctgaacccaaggtatactcaagacaagacatttgaccccaagcatagtgaacagaagatatttgcccgaagaagtaagagagtgagagctgcctgcggaagcgcaccccggaggaggaaggcaaggagacctggccgggacgtgatgtgacaagcgacctcgagcgtatgcagccggagtcacgcccggtgggaacgtagactctcggggtcacgcccgggagcgtatcaaggaagcaagtccagaggcggcgcggatcgtcgcgaagagctaggacgccgcgtaccctgggacgtcgtggtggtagcgccgaatctaagcgttgggatattgtgactctccccttaaaaaataagccaggacaaataagcccttaataaagagttcaattttccctgtactgctcaagtgacttcggccaagcctgccgacggatatccggaggacccgagactacgaccgcgggaagctaagggcacatcaacggcgcaggacagccgtctgtgtggacttcatcaactcaagttcagttaggtggagaccagcgacggccttgagcttcttggagtgatccatccattccatatcctagttgggtcacttgctgtgctcgtggtagtcatttcatattattccagagggtattctggggtgctaggtagtcgcctccaggattttgtattgactgcttgtgtgaagggaaggtaactgatagcgattgtattttcctcctttattggaggtggtgcgcgtttgtgtgagtctcaggggagctaggcccctgaatttcagactcgagtgagcctagtgtgtgtgtgacccaccgtccaagggtccaaaagaataagtgacggctagttgtagtgtttgtatactctgtatttgttggttttatcgagctaggagggcatttgggtaaggtgtcttctgagttccaagtgccggagttgactgaaatcctggaccctgaattcgtgatattctgggtttcgagtgatctgattctctggatttgccttttgtgtggaggtgcgttctgaagtagacgtgcactcccgcacttcttcgaggctacatttacaaccggtggagtgccgttccgtcgaagacaaacgagccgacagggattacacaaggtacccacgccaaccaaggagagtgattttcagggtttaaagctttgcggctgcgaatctatgggtctatcttcttgctgttgactctcaagtcgattctctgggtctacaccctggagaacagtcttgggctgcgctatacgaacccccctgggtgacaaaggtttcatcggcctcgcctcaccgcaatgcagagaaatacattcagtttgagattcacacagttaagagttaaggattgactcttggactccgtaaggtgtacggactcgtacgttctggtattagaacgggctatctgaagctgagactctgtgagtctgttaagcttcctctgacgcaaagctacggctgccccgctgcattgttcgtctaacaactcgttatcgaccaacagcaactcgtcgtcgttcaccagggcgtcaacgtccgccagttcgtcttcgtcggacagcacgtcgcgcgctgctgcaacggctgctggcgcccccacttgctctcgtctgggcaaatatccgctagagctagcccaaagatccttcgtgcgcggttgtccgcatcgttgccacttggggttgtcgttgccgcttgggatctataaccaccgccgcgttcagcactccagcgtccacattgctcaccgtctggcatgaccacaccgctacctgttccaaaattaatgatgtacgctatctgatgaccatagttgaggacatagcaaagtgtaccggacggtggcgtgcccgtcaaagcgttgaggacgctgttaaaacgttcattgcatgcgctgacagcatcgacgtgccgcaacacacggcgacattgcggggtcggcgacgaggacagctaagttgggctgctgccatcgcaaacagcgtaagcagagcagtaactgattggccagtttgttcttccttcttcgctcccgttggcaaatatctactcattatcaagtcctgccaatgtcctgtaaaacccgtctaacaatcattttactgggtaatcgcgcagccaagcgatacatctagaccacgatcgatttcagccctgatttgtactctgattaattaagtgattgaggtctaagaaggggttgctacagatgggtgttttagccggctttcaccataaagctttttattgttaaatgtcttagctttttaacacgggtcatctattgcgatcatgcgaaaaatcgacgatcttcggaggtcaaccgaaattcgaagatcaacaaatttgcttatacagacacaagattcgaagaggggttagagcacacaaatctaagcatagtgaggggtgttcgggtcatggcacccgcgttgttgctcagttatgggtcgccgaggttggacttcttgttcagcggacagcatagtatgtccatgcaacttgacaacaggcccttccacaaagttctttcgaatgatttcgcttaattgcacttcaggatatgttgacggtaatcttagactgacctcagcgtaacccaaggttactaaccctcaggtctgcaatagcgataacttctcaactagcgacggcgctcgacgcttaaactcacttctccgagcgcacccatggccactgccgctgctcacgaacgcgcgtaacgcaaagggggagttttggatccactcgaggggtaaccctggcgtaaccctcgctgtcgagtttttttttttttacatcaggacgataactcgacagagcccgattatgtacaggttgtcttcaacaggaacagcatctagttgcctttgtgaaccagccttctgagcgctaggacgtgtttcagcgtgcaagtagcattgtatcatgaaaagcttaccttcttctacatatatggacgtttttgaagcattgttttagcacgagctccttgaaattgagcggtgaatcaggcgtatgttttccatctagatgacagtggtcaaaacggcacgaatcgattccaagctagatgacgatgttacagacttattcactcctactcagggtagtaagcattcatatgcacctacccataaaaccaaataggctgtgcatcgatactcgactcaggggcatcctccgaaatctcgcctgatcgcaagagatgacccgtgttaaaatcaaacataagatacgcctcttttttttcaagagccccgcttccgcaggcttgacatttttagatgtttcagtacctgtgtaccgtgcacagatactgatatatggtggtaatgtggccttcaactgatacatgtggtgttattgtgctttggcgagatttgctgtgtttatagcgaccacccgctacatttacgataaatcgaggtgcataaatgggtggaggtctagaattacgctaaaagcgccacaattgcactttcaaaagtgcaattgtggctatgcagctgcaattctgtcggtttttatccaccagcacctacacacacggcaattatgcataagagggtgggtgtgctgtggatcatggacggtggtgtactgggccaatgcatggctgctgacaggcccttccaagtcgatatatatatgaggaggtggatccatgcacaattttagcaggtcgtgtatcttcttacacacatatttaggagcaggctttgccatatttagcgtctaaaatggtcggcaaagtaactgcaaagcgcaataaaaaatactgtatttgagcttcttaattcactgatgaagaggcacgtctttgagcaggtgctgaaatatgaaatggaagagaagttcataaaagtatttattatcaattgaagttggtttctcctacagaagacactcgaaccacttgatgggtctcaccgtgtccttgaagattccatcgcccgttttgaacgctgtgtctgcgtggttgagctcgcactggtagaattggtcccagtgcgttctaccaaactgcttgggcgaaagtccgccggcgcagctgtggaactcgacgagtccgtcgttcttggacgacttgtgcgggatcaccctgcctcccaccatgtacttggcctggtacttggagatattccccacatacgaactgctgcacatcgcggcgaacacgtgcttgcggtaggcctcctgggcggcgtcgtaggccgcgtctagcttctcgtcactgtacttctcggtctcgtacgcacacgactgctgggccgtggacgtcgggcacctgccgttgaaaagcaagtccgtcatgaggttcctcacctcgccattgcagaagtccatgaggtagtcggacgacatgctgccagtcatagggggactcaacgcgatccacgtggcgctcttaccgagtttacactccttgttggccagagctccagccagcatgaggccacccatggagtgcgtaactacgatcgtgtcttcaatggtcttcgaggacttgtcgctcttgtcggacatggagagcgagtgcgtacacactttctcctgcaacgacgagttggtccacgcgtagtcgacggtgttgagcgacgcgtacttgaccacggtgcagcacggggtgtggccttggagtttgtcccagccaaagtggcggatgctgtcttgcagcttcggctcctccttctcgttgcccaggccgtggaagaagatgcagggccgaggggtcgaattgcacgcgcaggaagatgcagccatggccatgtgcgactccgccttgagcttccttgaactgctgactggaatgtcggttccagtgatcaacgccagagccgtgggcgtcacagacgtgggtttggccacagtcttgcaggacgatccatcgctgagcgtgggcttcgagatactcacgggctcgtccagatattccacgtcgatggacaaatcactcgccaacgcagtgaatccgtcctccccggtagaacagatcgcgtagtggacgccagcaaacgtcgtcttgaacagattgccactctcgcactctaccggttcgtctccgatggacgcgcttggaatgggcgtcgcgtggttcaacgcaggtagaattttaccgaacggtagagtgctgggcgggatacaccgcaccgacgcggcgttggacgagctgtcgttcgtctccaagtacgcggcgccgtccacgagggagtaagtgaagcgcgaatggccctccacgaacgtcgcgtagccatcgtagagcaccttctcaccgtctttcgacaccacggggttggcgtacacgttgaattctgtctctccatgcagctccatcgccttgcgctgaagcgtgacatgtagcttcacgggggatgcgtcggccagcgacggcgtcgccttctggtggtgcgtagtcaccgcggattccgagaccgcgaacagcgcaacgacggccgggatgactaagcgcaggtaaatcatcatgttgcctgtgggatcacgagtctaaaccgagtctgctgcaggttgacggagcctcgaggccgctttgacttgggttgggttggcctggtcgaggacctcccatgaagccgcgtttacggagggacgcatcaaagttcctcgatcccaggcagattggtcgagtgatttgcccgcgcgttaattcctctcgattggcgcgcgggtgccgcttttccccggcaaagacccagaagtcggacagcaaagcccgaaaactatcctacgggcagcatatggggccagcgtgaacatgtgtacggtgtgagctgttcggtgtgctgcaacttggtgatcgccggcccgaccgcgaccgatttgttcaaacggagcgactctctccaggtccagcagagcggctacagtgtacatcgagtcgggtcatcagaacgtcgcgcacaaaactgaccaaccaggttgccttcatccaggcaaacgtaccaagaaggcggaggctatccctggaatttggttcacattttcgacaagtatatgatcaatttggtgaattacatgtagtgatggccaagtgacatacgtcctttgtgttgccattgctagcgtgaccgttggttttggctttgggaagccgccggcttcccaaaactccggcgccaagccggagtcgactcggagacatggctggtattactgtagtattgcatgtgccggtagctcaggatacatagcgcatatacagataccgctgactaacttgtacagtggtactgttttagttcctacaatatattatatgtgttcagtataaacggtattacagataattgaccttgaagtttacatgcattcaaatcaagagctcactcagccgaatgcggagtccagcttcgacttgacagcagaggcaccgcgcagaattcgcgatggcggctcgagacggcggctgggaccgcttgaacttggcctgggaccagcgagccagatcggcgagcgatggcggcggctgcgcccatgcacctcacttgcccttggtttgcttggttgtgcttgtcatggtgggctgcggggggaggtgttttgcagggctctgtttgaattgtaaaagatccctctggcgggaaaccgaaactggattttacctcctaaaagagatacggctccattaccgattttgacggtgtatcgattgactgtgtgtacaagttagtcagcggtatctgtatactgaaaggaaaatgactaaaccggtatgaaatcgcattttaaatgctgaagcggtatgaccccccaatcacgcataacggtcggatcactggtgtcggcagttgcattctgtccgttgcagtcacgaggcttttggaatcgaccgagacggttcttatttcgtactttattgcgtacatagtaaactcatgtcaaatcaaaatctcgggcggtttgctggcgatttggctcggtcgattcaatcaatcgacttcgcaatatacactacagactagagcgtgagaacgagacgcctgatatattcggatttaaaagggaatcatatgttgcagacagcactttatgtattttacattgactctaatacctgatctcatcggtaaaaacgggtattaattgttatccgtctcgttctcacgctctagtctgaattaataatacctacagtatgggtaagaattccagaaggtcctgcagctaagatatgaaactgtacctgtaagctccacggccacatttggcaaatgatttgctggtggtgttcatgcaattgtaaacagattgcgaacaactggatccagttgatgtgcgcactttccccaaccttcggctccgacttcatcggcgtcaatgccgaccacttttcatttgtctcaacaacggagaagacgtggctcctgtctaggtgtaaatggtatctgcaactcgagttctcgtcgcctccgctgttgcgctgctcgccttcactcatccagccaccgcatcaaaaccctcacagctccaatcctcattgaagaatgctccgtccgtcacacttcacgtcactctaaagcgcaagtccatgaagctgcacggtcagtccgagtttaacgtgtacgccacaccggtcgtgtcctccaacggcgccagtgtactatacgacagctacgccacgttcctggacgaggacgaggagatcacctacaccctcgtagacggcaccgcctacctgtcgaccaaagtcggtgatgacgaagaaacagtccgctgcctcccgcccaacactctcccgttcgacaagattctaccagcgctcaacgacgccacccccattcctagtgcctccatcggcaaggaagctgtcgagtgtgcgagcgggaaactgttcaagacgacgttctccggcgcccactacgctatctgttcgtcgggtgagtctggcttcactgcggtcagcagcgacttggtcatcaacgtcacgtatctcgacggtccgatcactgtcccccagccggagttgacggacggaacgacttcgtgtgagcccgtggagaaagccacgtccatgacgcccactgcattggcgttggctactgggggagagcttccgtctactacgtccaggaagctgaaggaggcggggcacatggccatgaactcgaccgagtgcggcgagtgcttgtcgacgcctcgcccgtgcatcttccttcacggactgggcaacccgaaccaggagccgacactgcaggacacgcccaagctaaccaagaggaagtttggagacattcacggccacgcgccgtgctgctccgagatcaagtacgcggtgctgaacaccaacgacgccggctggaggaacgatacgttgcagcagaagttctgcgatttctcgctcgaaatgagcgcgacgagcgacgtggaggctgggatcatcgacaacactatcgttgtgacccactccatgggtgggctggtcatggccggagctcttgctaagggcaagtgtaagtttagtccgacgacgtcgtgggtggctctgagcgcccccatgactggaagtatggcttcggattaccttatggacatctgcaatgacgaaggaggggacaacgtcgctaccggtttgttcgagattttgggccagtgccccatgccaaagtcccgcaagtcgacgatctaccagggtgagaagtacagtactccatcgattgatgcagcctacgtcgcagcccaggtagcgtaccgtggtaatgtatcggcggccatgtgcagtaacagcttcttgggtctcttctcgagctaccaggccggatgcatcctcgcagggacgattgttccgcacaagtccaagaagaacgacggtctggtggagtttcagagctgcctggctgggcttgacgagtccctgttcggaacgcactactacgaccggttctacaagccgcagctgaaccacgcagacacggcgttcctcaatggcgacggtctgcttaaggattcgcagaagcccatcaagtggttcgagtgtctagcgctatagtcttggacctaatcgagggcggtggcgttagtagagtgaggatgtagtatggtgtttcggaatttataaagcctcttgttcactcggtataaatgtagaagtgttgtgtcgatgttgtcgcctagactcgcaagatttcgagacgaaaacccattcatcgactgtaatccttccttccattacgacccgacgcgaagcacagcggacacattatgcttatggcgacagtcacttcttatttttccagcagccaacgcccggggtgttttttttggcattgtgttcacaatgcgagcttggataggattgctagtggcccttgccgcttcgttgacggctagtatggcagcgtcccaaggcctcgttcaacctcatttgccggtaccaacccaccatcgacagcagcagaccttcaccagtttccctttgttgagaatccatgtcacgatcaagcgcaagaacgccaacttccacggacaatccgagttcgacgtattcgcgagccccgtcgtgttgaccgatggcaccagtctgcgctacgacggctataccacgttcgtcgaagatggtaccaagttcacgtactcgctcgtcggtggtgcaagctacctagcgaccaagaaagacggcgccaacactgaaacagttcagtgccttccgtcgggagcgctgtcgtacgactcggtcttgccggcgctgaacgacgcggtaccaattcgtagcgctttgataggcgacatcagtgtcgcctgcgcgagtagcaacctgttcaagtccttgtatcacgacgcaatcttcgcagtctgcgcttcgggttcgtccgagttcaccgcgacgggcctcgacttgacacttgacgtggagtacctgcagaatcccgtcaacatttaggtgccgaagctcaccgatgggtcaccaccgtgtgatagtgtagcaatgcccacaaaagtggcgccgacaacacgcgcgatactcactggcagctcacttcccacggctacaccgaggcgcttgaaagcatctgctcccatggctattgaggccgaatcgtgtacgtgcaagtccacacctcgtccctgcatcttctgcatggtttgggtacctcgaatgaaagagcggagctgcaagatactccaaagttgacccaggagaagttcggtaacatcggagaccacgctccgtgctgcaccagtgtcaagtacgcagtcatcaacaccatcgacgctgggtggaggagcgacacactgcagcagaagttctgcgacttctcgctctccatgagcgagtctagcgacgtggctactgggaccattgcggatactatcgtggtgacgcactcgatgggcggcctcgtgatggcggcagctctcgcgaaagacaagtgtaaattcgccgaaagcacgtcgtgggtcagtctgagcgctccgatgatgggaagtatgaccggagacttcattcgagacctgtgcgacgatgaattcacgacaattgtcgctggggtgctggatctaatcggccaatgtcccgcgtccacagcgagaaagtcgatcatttaccagaacgagaagtacagcaccccgaaaatcaacgcggcgtacactgcggctcaggaagcctatcgtggaaacgtgactgccgcgatctgcagtacgagctaccacggcgtcttgtccaagttcacgccgtccagcctatttgggggcaagatgatcccgcacaagtcgaaacaaaacgacgcgctcgtggagttccagagctgcttgggcggctcgacccgaacatgtttggcgacagctacctcgaccgcttctacgcatccaagctgaatcacgctgacacggcatttctgacgcacgatggattcttcaaggactcgcagaaacccttcaagtggttcgagtgtctgctctagcgtatcatcatcacccagtatcggtacagtaagtttaagcatggtgagcagaaatataaagacatcgctttgcccacggttaacaaacctttccagaatcgtaagaaactcattctttctgccaaagtccaccgattatcttctacgattctttagtttctgctcccttcactcggtcctccacacatccaagtggaattttcttctccaaatacggaaagacccactttgcgctcacagccagcagcatcaccagccagccgataagcaccagggtgtctctggggaatgcctccagcagcatttcctccaccacaatgtcgaacacacactcgtcaaccttcagcttcgagtcgggtcgtcggactccctccacatttgcaataagtgaaaattccacttcaatggccgcccccgagggctcgagacggtaccgcaccgacttgtgcgtctccatctccctcgggtggagccgaagcttggccgtgttcaatacccgacgtcgagctggcatgatcttgcttttcttgacatttcccgcaatatttgcagtactaacgtcaaatttatcttcactcaccacaggcagcggcagcaggacctgctccacctgcagcgagaagagcgacggctgcgtcgctgggtacgacactttgatgtcgtaaactttgtcaggttcgagatccaacacgcggtacagctgcggctcgccgtacagtacgcgctgggactgcagcggcgactccggacgcagctcgacgacggaagcagcgtgtggggacggcgaaggggacgccgtcatcgccaggaagaacagggtggcgagcagcggtagcaacattgcgttacagatgggaatttctacactccacgacaaaaagatatggacaccaccaaaagtggctgtaacttcgtcattttttatcattttaaggttcggtttggactagagttgcagaacacgctgataaagatctgcacgctgctaacacgcgcgcttttgcgcttcttcaggtagctcacatacaaatcactggttctgcccaggtgacaaaacttatggacagctaatctccatacaaaatcctatattaaccaaaaccccttacaaatgatacgacttggactttgtataaacgcatttattatgaagatttgcgcatatttattgtatattaaagtttatattgaaaacataatccataaacacaaatctaatttgattggccaaaacaataaattagggtgacacggatagcgcaggtaccttgcctttgttggcagttcctaaggaaccagcctcacggcgatactcgcgacgttagacaaagatctgatggtattatcgtgtactagaaggtgtgtttagtaacctgtaataaatacatcgaccatcgcacaaaacggagcaagtagtaagcaactgaaatttcgagtggtggctaccatgtattagaggatgttagcaacttcgtaaataacgactcaaatttacggtcaacatttttatgtgtttagttaaaacgaaatcgtcgacagtgttagcattctcgtgacacgatggaattggagattttcgaggattcccgagctgcgcctgtgattggttggctcagaggctcactatgggagaggggggcagcgacacgtggcgtatgggaaaagcggatcccggccggactcgcgttggcagtgtacaaggtttggtgaccccggatggagatgtccccaagagcggaccccggctggaaccaagtaccgaacgagaggcaaagcccaagggagcgtagaagtacctccgactggaggccgcctgctcttggtgcactgttcaacgcaagaggagcccgaccggatcgagtgaagacccagaaaccgtgaagctgtccaagacatcccggatgtgaagcccaaggggagtgtgatcccgtttggagataatcatgaatcccggatggagataccaagaccatcccagatgtgaagatccagtatacaaagtccaagatgtttccgaccgaccaagccgaccagccaagatctgttcggattccgtggaacattgtacttcacttgcgtacccagtgatgattatacttgctggaagtatgctacgagggaccgcggacgattgcgacgacacgaccatagtgaagacaagtcaagattgagtgcatgtaaagatcgacagaagatagccagacagacagagaggagagagaccacagataacagataaacagagttcgttttgccaaggatcgcgcaagtgagttggagcagcctaccggacgtgcattcccggaggaccgactaagtctacgtgtgagggcccagcaactgtgacacctgggtcgagctcccgcaacaaagtccagtccaagttggggtgagtaccgggcgacaacccgaggttgatccatcccatttcatttcctagttgcggttgagctcgtccagaccagggaggccccgcatttcatattactgattaccttttcaccctggttggagtagccccgggtgggaagtattgatttaagagctattgtgtgataggaggtatttgattgtgttcgtttccctcagtacttgagggtggtgcgcgtgagccaaagccgtccgggattgaccagtatcccggagtccggctggagttgactggagtagtgaccgaccctttcacagtccaaaagaataaggaagggctacgtgtttgtatataactctgtatctgtttgtattgtttggctatctgcgggctgtcagaggcgacgtccaggaaggttacgttcttccctgctacctagcgacctacaagtatcaagacaactcatccacggttgaaaacccctggttacgaagacaaacgaacccacagggattgttcacaaggacacacgccaccccggttggagtgtacatctaggtgtactatctccggctagggtttgttctgggtgcaccccattcgggagtctacacccgggacgcgctaaagctatacacctgggcggtcaggcgttcacccgcctcgcctcactggtatccgcccatttacgaaatccaactgactcccagcgatagaggccgccctgctgatacgagatccctgcatccgatgccatgctgcttcgcgctctgagcgccccgagtgactgatcatcccaggcgttcaaggctcaacgagcacagcgatgcgtactgcaagaggtacttccgcttcaccgaggatgagattcgcgtgctcagtgcagcactacatttctcgacgtcatcacccgcgatagaatcaaacgctacagtatcgaggcactttgcatcttcttaggttgccatatccaaaccaatagtacgatcaggaactcggacatcactactctaagcaacatatcctactttatgctgctctttgtggtcaatggctgcctactctacttcgacgcgccgttatgacttaagacgcgcagccgaatcctcgtgtgcctcgctgggagaggcaaggacgtcacactgattagggggggggggcacttgagactggatgaggtggttcgagtgactcgaaccaccgcgactcgattcgagtcgcggcgctacatgtatctgtaagcgccatggcggccatggtgctcgagggggagatgcaggatgagagtaacgagccaatcagaacgtttgtagtctcgtgaaaaagccttacgagtttctcgggagattccgtactaacacgactcccctcttactagttcgggaacatagacagcggtggtcgagtgtctttgtccccaactcgtaaaataccaatttgcttacatcctctattatctgattatttgcgaggcacgttcagttgcatcctagttagtgcccattggaactcttccaaaactaacacaaacgctgtcacaaattgcaatttatttgccaaatgtcccgtttgcgtcgtgtttgctacaaccgatgataccgaccaaaaccatcacatctgagtgctaaatacatggctacgctcactttttgtattaatacatgctggctagtgactgtgccgcggtgcggccagtcagctcattagacagcagtaccaacaatgcgtaaggtgcacgtacaattaacttgggtggtagtaaacactcagccgcttccgctggctctgctgtccacggcttgggcgcactgacgcagagcttgagagcgcgggtgtgaacgcacagcatgagcggtgattgggaattgtaccaaaataatggtacgtttcatttgcgctcggcgcaatttgtggagaccaatttgacgtctccataaattacgacggatttgctacgagaaatacgccacgtttatgaccgtagcaaatatcgagattgtgtgggttttggtagagctccatttgtagctctgtatgctgctatctcttggatatacgattgatttctccattctaaactgttggtcgatgatgtatggctcagtactaaggtagagtggagaaatcatgggttccttgtcgccccatacaaagtccaagtcgtatcatttgtaaggggttttggttaatataggattttgtatggggattagctgtccataagttttgtcacttgggcagaaccagtgatttgtatgtgagctacctgaagaagcgcaaaagcgcgcgtgttagcagcgtgcagatctttatcagcgtgttctgcaactctagtccaaaccgcaccttaaaacgataaaaattgacgaagttacagctgtcgtggagtgtatgtgggtttgttgtcgcacataccatcaaaaatccatttttggcattttctagtattacagtaactatattaatttattaaattataaagttactgtaataattgaaaataatttattttaataaaacattatttttaaacaaatattttagagcctcctgtaaatcaattgttatcattagcgattggtatcgctggcctgataaatccaaaaacatactacccgtaaggctccgcgaagcctcggataggaactttgtatcatacttaaacgagaacgattaacaccaataccaatgctgtcgcaggcaggtcctgtcaactaccgagcggagcgaggtgctctattaatacctccgcctccggggaaggaaaaaaggggggtctaggattttgcgccccaagggtaaaagggcggggatggaggccttggtggcgcagcagttgatcccagtcgctgggttggagctgacggagctccagatgtagctgcttgaggaaagcgacgtgcgataccttgctcttgccatcgacggtgcgacgtgcattgtagataatgaaagcgttgattgccaagtcgatcaggctgagaaacaacgacttgtagtattttttgtagcgtctagcgagctgcagcgagtacctgtagtacaatacacgttagttgtcaacctaaagcatgtatgtacacgataagaaaacttaccgctggaggcggagctgatcgtggacatcaactccgcccatgaaagtctggtagtccttgacgaatcttggacacatcacttcagcgtgttctccggtgctggatcacgacgcacaattctgtctagctcagcgcttccacccgcggcgagcacaaagacaccttggttatcccaccagcgtgtaaacttgatccgaggaacttgttgcatctctgcgatgtgaaacgtgtctcgtgcgatccatgtcgggcgcttgtttgtctccttacgcccgattttcttcttcttaggtagaatcgcactacataggcccttcttgttcgtcatgaccgtccccactgtgtagaaattcattgccaatagctgcattgatagtacgaccgatgtatagaaccggtcggtgacgataagccggaactcggatggaccgtcaggcccaaacacttgccgtaggtttcgcaccactgccgcaggtccggacttggtatcgacaggagtggtgccgtcgtggttttgccgctttccgcagtacacctcgaaactgtagtatacacgatagatacgtttggttagcatgtatggcacacgataagaaaactttacaaccaaaaaaaatgagagagcgtgccagaggcacgctctctcaccttactcaccgaatataatacgcggactcggagcagcacagcatgaagagcttggtcccccagcggtggggtttatccttcatgaatgtccgcatcttgttgaatggtgaagtcgagggaagcaccgcctcgtcaaaagccatgatgtttggggggatgaagttgcgctggaacgtgtcttggagcgcgtcaatcaccggtcgaagctccacgcacggtcagtggcagcttgagcgtcagagttgctgaagtgaagattgcgcgaaacgtggtcgaattgatcccgcgtcatgtactggccaaagcagccgcgtgggatggccccctcgtccgtcgtcttccaatgattggcgaatttctccccgttaggagcaattgtccgcgcaataagaagtccaataaagatgcacaagtctctgcccaaaatttcaggagttttttgcaagtttgtcttgatttgttcaggtgtttgaggctgaaagcccggcttcttctgctgtcgggcttgctgcttggcatgttgtgcttgcacgcgcgcgtccagattttcttcaaagtagtcattgctggttccagcaattttcttcagaagttggggcgtcacgaaccgtagaaacgctccaagcggtgtcgaagcagcgttgagagcgccagcagaaggaccatgatcaccatcgtagataccagggtagtcttcgccaatccagccatcgggccgggtttcatacggttcgtccatgtagggaaacggtgttttgagttggggtacagtccagccattcacccgcatctcgtccagtacggtggcgggcacggcaccgcgggcaactgcagccatcccaccagctgcatcgacaagggcggggtcaaaaatgacgtcggtcggagtatttgtctcgtcgtcggagccgggatcaggttctacccagtcaatatcgtcgtcgtcatcgtagaccgagcttccttcgaactcgccatcagaatcaagtgctacgtagtcgcccgtatcgtcagggcggacgatgtttggatcctctgcaaaggtgtctactacaacataattatacacgttaatttcataacatgtatcgttaacgtgtatgtacagggtacacataccgattgcttgaggagtacatgcgacttcgtcgatcttcgtttcttcatcaagtacatgcgttccagcgagagccgtcgaccccatcgatgcttccccctcactcgcggttggatcagggccttcctcactgctgtcttcatttgcagcagtggcaaagtcgtcggtgaggttgcgttggggtagcgaagctggagacaggatgttgtcgccatcctgtgagctggttccgtcgctcatgacgtggagcgacgttgcaatgagctcacgactggggccagggggttctggagaagctgcacgatgagaacgattgttagtttacagttagataccgcaaatgtagtcctaacttaccagtcagtgacgggttgtcggattcgctgcttcctcgtgtcgtgggaggggcctgcgctgcaggctcgggtggctctgtaagatacacgatagcgtcagcagtgtaatgtgtctaatgcaagttgcgtcatacgtaccctctggtgtcattgcgctgcttgcggggtggttctgcgctgtgatcgtgtccgagtactcttgggtgtccttcttcttttgtcgctggagctcggctagcagcatatacggcttgtaagattccgtaagtcaccagttaaaatatccgagcttaccgaggtccagccgatccagatacttcatcaactcgtgctcgcctacgaagaaatcgctgccgcgtacgcctttcttgttcttgccaggcttgatgtagaagcccaagaaggccaacggcagaatgggcaacatgaacgaccacgctccttgctgcaccgaggtcaagtacgccattttgaacaccatcgactcggctggaccgacgactcgcttcaacagaaattttgcgatcgggccctcatgttgagcgacaccagtgatgcggatctcggcatgattacagacacggttgtagtgacgcactcgatggctggcgtggtcatgtccatggcgcttgcaacgggcaaatgcagcttcggcgaaggcgcgtcttgggtggcactgagctcgcccattcagggcagtttggcagccgaccacctccaagacttttgcacgggcggaaagagtgacttcgtggcgggtatgatggaaatcattgggaaatgccccatgccagcctcgcatcagtcactcatgtactacaaaggcaaatacgcttcgaagaagctgaacgcagcctatgagcttgcccaagaggtctaccgcgggaacgttagcgctgccatgtgcagtgacaaccctcatggcattttctccgtgtatcaagcgttcatgcttatcagtgccaagagagtcccacacaagtctccagagaaaaacgacgggcttggtgagttccagagttgtgtgatgggcctcgacgaatcgaagtttggcaagcattacaaggacacattctacaccttttcaacttcaaaactgcaaattgtaagttcaaaacagcaaaaggtaagatcaaaacaacaatactctataaatgtatattacaaactgaatgatatctatcatcgtatacgattatagagtacaatttgcctattggctagctatgctgcgtgccaaccaatgagctgtgtataaaagtgcctggtctctgctcgtgcagttttgaacttacaattttgctgttttgaacttacaatttgcagttttgaagttgaaaaggtgtacaggccggagctcaatcacgccgacacggtgtttttgactggcgatggttacttcaaggactcgcagaagcctgtaaagtggtttaagtgtctgctgtagcgtttcggtagctgcagaggaattcaggttttttgcaggattaggtagtagttgaggcaaaagcactggctgctccactgaaaatcacatagattgggggcgaagcattttttttatcaattgcagtcgccaacaattaggtagtacggaggttttcttctcacagcaacgtaaccaaacgctagtgcaacctatagggatgcttttacagttagtgtttgtgtgagcacgaaaagcggaccaacaatagtaataactacctcgcttcaagatgaagaactcgcgtgtgtaagttagacatgaaacaacggccgtggcatttggatctcggccgttgttcaacaaatcaagggcgacgttcccacgatgttcagggcgcgttaggtacttccaggtggataaagggttacgggacctttacatgaccccaacctggaatggagctcaaccacaacaaatgaaagccgaaggacagcaacaagtcatttccacttcgtctagctcctctccgccggtcggtttccctactcagaatgcggtcttcaacaggattatttggtgtcgttctcattgcagcggtggctcatacaatagtcgtcggtaacgcgcttcgtcctgcagtcctgccatcaaacggccctcgactagaaacctttcttggtgacgccccagcgttaaagctccatgtcaccttcaagcccaagagcatgaagattcacggacaatccgagttcgacatcttcgccaagcccgccgtgtcagccgacggtgccagcgtgctttacgatggctacgctgagttcaatgaaggagacaacccagtcacgtatttctacgtcaaaggcgctgggtatttatcgacaagtgacggagagaagcaaaacgtgcagtgcatttcatcgagcgttttgccattcaatgacattctgccagcgctgaacgagttgagtgctggtgtatcatgcgacacggtggcacagcccagctcagtgacgccggctacacaagccttgctgactggccgtactattccgacgagtgcttcgagaaggctcaagacagcagagcacatggcgatggaagcatcttcatgcaagtgcaagaagacacctcgtccgtgtgtgtttttccatggcaaacgagatggaaaaactacaggacacaccggcaagtaccaacaaaagaatgggcaacatgaacgaccacgcgccgtgctgcaccgaggtcaagtacgccgttttgaacactacagacaccgagtgggtggacgagtcgatgcagcaaaagttctgcgaagctaagtgactccagtgatgttgagttgggaatcatcaagaacacggtggtcgtcaccggttcgtgggtaaggatgaaaaaatagattttgatttgtatcgatacaactgatgtatataatgacgacgtttgtgattgggacgaagtccccattataatgacttgataccggtatacctctccttaccgtagtgtctggtgattgattggatgaaataagtaggtttagggttgcaatgtatagcacggggcggcgccctcgacctccccgaattttacttaggtatagtgagcttttgggcccctcggacgaggggccaagagactcctcacagactttcagtaagagcatcgtcatcggagggccttaaagtaatggtacataagtgcacggcgccccttcgtctcgcggtattacggcggtatgtcctgataatccttttgccttcaccttggcatcgcgcggagcccctctcaacattgtggtagcgagctatgcaaacagaccccggtaaggctgaccacctgatcatgaactaggttggacacgctatgttttgctgggttgtgaagtgtttcatccgtagggcaagatcttaatagatctaggtattcaagcagcccgctagcagcttgaaagagctgtatgtgtcgttctgtggacaaataaacacttactaagcggtaaagatcaattttatcgtacaatacaggcatttatttgtaaaataagctctagaaacaataggaaacatgttgctggcggcagtgcgagcgttaatccttgcagtatctctgtagatatctcaacaaagcgcctattaatcgctgtggcgcgctagcgttgcgtggacaccacacgtatgggttgcgtgtacgcgcactccagtgggtagtttgcgccgtcgcggtggttgatcatcttaataaaggcgggatcttagtgctggggcccacggttggcgcactccagtgatttgtttgcgccgtggtggtgagacaggagttttagtcggtgcatgtatcataacattgtagattacatatgtgcatggagccgcgcgtgggcgccctcaagtggtttgtttgcagcatgggggcgatcttgaagaaggaagtgctatacatacacagtgtataaatttattcggatttcataaaaacgtacacgaagcagatccccgcgcttcgcgcactacagtagaacgaaaatagtaaagttggtcattttcattttcaccggctaaagcgcagaaaggcaaaactaacaaatggagacgccggaggaattcctagctgattttgatgccaacttggacaaccaggtcgctgaggagaccgcgaactacttcgacaacgtcaaaagcttccaggcggctctgaaatcaggggtcatcgacaagagttcaagtgtcagcggacgcttttgcgtgttgaaggcagcgaagacgaccaacggcaaggggacgcaagcgtactgcgtcaactcaaatctcgcgtctcatgtcaaggcggtggaggtgaggatggaccaagccgatcctgctttggtaaagcagcgggtggtccgtattacgctttgggaccccaagccaaagccgcctgggccgattctgcgtgtccggcgtggctgcatttaccatttccggaagatccattctgtggaggattactacggctggacccaaggcagtcttcagctgacatgccacggggacgattcgctggtgaagcaggtgacggatttcacgccgagtaagagggctgagaacgctgcggggaacgaagacgaagagaagagcagcgaggacctggacatgtagcttcaagtggaggaagcatttgtgttgagtgcgacagctgagtcgtgacgacaaaagcagtagttcgtattaacattacgcgcttaacattaattcatttgccttcttttcattgccttcatgttaaaacatcgaaaacagtgcgatgaattttcgttttaatacacgagcacacgaccgtgctagaggttgtccggatacaacttcaggtattggtgccgacctgcccattattgtattttccccgatgaccttccgtcgtaggggtgcaatgaagacagttcaaacgacgctagataggttcttcaatgaagcctactgcagcgctcaggggcgggatgacttggtatgacagtttattggtcttgttgttgcattattactgatacgtcttcggtgcaggtgtgcaatcgacgaacagttgtccaggcattcgcggagtatcaggacatttcggtaaacagctacatttgccgggaccgcaagcacgtcggagaggtatggctccgtgctccattgtctgccttgttctttaatttttagcactgcttgtataacaggaagacattccactttgctgttgctgggccggtctggatattgcgtcgacatgtgcatcacagtgcgaaaactatcacattttgttttatcgtttcgcatttgagatgacctcacaagctgattcatgttcagatgcagatcgagtgtttgcatggtcattgcggtagcggacacgaatgcagtaaccagcagttgcaacgtcaagcttttccgctacggtatatcgcgcacctggagagcaagggtatttctctcatggcaggtgacgctatcgggcccaagcaatgcattggtgagtacacaggcgaggtgatcacaaagcagcagtacaagcatcgacttcaggtttgtacgataacaaaattcagtcaggataatcgttaccttgcattttttacttgatagactaactcgattgttgcaaagcgggctcgttccaattgccacatatacggcatgctgctgaataaccaggatgtaatcgacgcaactagaaaaggcagcataattcgttttgccaaccacagctgctctgccaacgctgttattgagcgttgggaggtagacggtgaagagtattgcggcctctatgctttggaggcaattgcgaaagacaacgaaatttcgtttgactacagggctgaaacgttcatggggcgcgtaagtactgtacatgatcctatcataacttgctactattcataacaaggtttgcctgtttttattcaatctaaataacagcgcaagcgatgctattgcaaggcatccaactgcagagggtacgtcgcaatttagggccatctcgaagtatctccagcaacaataaacacggggttccagatatttggacccggtttttttactacgaatgtggatcgtttctcagtagccttccttccgtgttcggtacgctgatgccattacttgatttgtcaacgaggagatggtgcgcccagtcagcgcacgagtgcgaaagaaagcaaaatgcacactcaagcgtattgcggctcgatatcgtagtacgttggagcatactcgtattgccaccatcttcacacagcgccatgaaagcccggacgatattgaagaccgtgacactaggctacggcgggaacggaatgatgcgactcgaagccgtaacgtcgcaggacagcaatgtccacgagcgcggaaaaaaagacgaaaaacgagctccggatgcaatgatactcgtttctcggtggatggaaatattaaaggtatgttatttttctttcgatgttaatcctgggtagtggactcatattgaatgtttctcgacttttagatttttatcagtcaatcgatgaaccctttcttcggatatgcggcagctgtggtgagcttacaaactctgaacgcatggtggtaaaaccgtttaacccgaatggagccttttttaagcctctctgcaacccggctggatcatgcgaagtcattgaagcgggaattgtgggcttgtctggtggtgaatctaggatttggctttgcgcccgctgtaaggatgcattgcggaaacgcggtatgccattattttgtcgagcttcaggctttcggatcggagaagtgccagacgagctatcggatctaaatcgcacagaggcacgactgattgggcttgggattgcgtttacgacgtgcatattgtttaacgggtatggccaggatttcactcaaggaaatgcagtaaactactggaacgatcctggtaagattgcgcgggggttgctcagacctttgacggcaagtggtattatttaccttcgctcacggatcaaccacggagataagtattttcgtgtacgacctcattatattcgacgagctttggagtggttgattgcaaacaactatctttacaaacacgtgagaatttcagagacgaatttgcatcagttgcaagacgtgtcgagtgaagtccccacgctggacattacagatgaagaagcacacgagttggccgctcatgaagaccgcccaaatacagtcccgcttaattcaaccgacaccggtcttgccttgggacaagcaatcaacgctgaaagaacgacatctagaggatacacacaaaattttgaaaaatcatccaattatccacttgctgagcctgatcttcccggtgcgagaaacgttgattcgtccgaaattccgagtggcaccaatttccatgtagaagatactattgaactacaagtttgtagcgatgatgctagaaccgaaatggaaaggcttgctgaggctgttaacgaagctacaggtcgttcagtttatccagttgctgatttagcgccgtgcaatgaactaatcaatgagtatacgacgaaattactgtttcagaactgcttccctacgttgtttcctgatgcaatgggaggacttaatcctgtgaagaaaaaagaacatcggattcatgagtacaaactggctgacaactgctgtcacctcatgaaatggtacgaccgccgttttgcgattcaccccacgtttaaatttttttgtttgaacttgattcaacgtagacagatagacggattaattcgccgcgttaatcctcgcgatctcttcgaagaaggcgatagttcagctgctactaacgacgaaacgaccgcaaaaaaatcaaccgactattgtagtaaaggtatgaagatcctagacactttaaaaccttactttcgtagtgttcgcggcagcgggctgtattgggcgaatgttcgagatgatttaatggcgatgcttggcaatagggtcattccaagtcgttggccaacattcttcttgacattaagcgcagcagactcgatttggcctgacttttttgttgcatgtgatccgtcactaacgttggagacagcccgtcacttgaactccaaaacgaggcagcaatatttgaatcaatgcccagatattgcagccagatacttcagtcgtagatttaaagcattctttgagcatattctttgcggtgaaagtaaaccacttggtgaaatcgaagattttttttggagagtagaatttcagaaacgggggtcgccccacatacacgcccttatctggattaaagatggtcctgatgtcttatcgttatccagaagcgagctagggagagcggaacttattcgttttattgacactcgcatatctgttttaacaaaagccgcagtagaccttaagcaatgctcctgctgtgtatgtgagactggtcgagagagtcaacttgatatcctcacgctgaggcctcctccgtgtaattctgctgaatgggattgcgatttagcccatctagttcatcgtgtacagcaacaccattgctctatcgaatcatgccgaaagaagggcaaaagttgtagatttgggtttcccaaagagcaaaaggatcacaccgaaatcgaagtaaaagaagcctctgacggaacaccatctattactgttcatctagaggaaatcatctacggttaataattattcacctgttcttcttagtgctggagggcaaacatggatattcaactgattggaaacgcgtatggggctgctgagtatacggcagcatatgtcagtaaagctgagccagatacgatccggtttagaaaggtgataacggatgcggttaaacgttgtgaccctaacctacccaattatgccaatctaaaaaaggtagcaaacgctacgttgtctgtacgagaagttagtgcacaagaagccatgtatactcttctcagagaactctgcatgtacggaaaatcaaggaaagttgctaaagtaaaagtattgcgtcataaccttcgttactaccgagttgactcaaccctcttagcgggtctgtgtgacgaagagaataccaacgacgatgttcacgcatcggatagctcgattcgtatcgagcaagaggaagcggcttatattgcacgaccacactcaaccttgtttgagagtatgacatatgctacctttctggaggagttcgaacccatcaagagtattagtgaacactcctcgaatctagacgtctgggctcgacttgaccagtgcggatatattaaaagacgagcaaaaccgcaggtattgcgcccatcccctaactttcgcgctgacgtggctgaccccaacttttgcttttccgaggttctgctccatgtcccctggcgttcgctaaatgacttacctaagacagacattgagtgcatctctcgatacgcggaagtaggactggagtcagagttggctacagaaagtaatgcaaaagtagcaagacagtcaaaacttgatatgctgcgggaatacactagcacatcaactacatctaagctcccgccccctgaatatgttttcgtagaaagtggtgtccagcactacgatcggctagatctcgacatcatgcgtactgaagaggccgccataccgtctactttcgctaaagaatggcaatcagtaagagtttattcgaacgacgagattcaaaaagcatattcgtttgtaaaagaatctattcagccgtggatgttggaaaaaaacgaagcccgccatcttcgacaacttcaacacaatcaatctaccggtagtcgctacaaatatccaatttgccttgctgatgttagcatgtctgaatcgcaatggatacctttcgcgctttgtatgaatcaatctcgaaaacggcaacgagctggtttggaaaatatagattgcgaaccgcttcaaatggttataaatggagaagggggttctggcaaaagctggctggtcaaacacattgtgaaagacctccataacgtttttggagagcatcaagcaactcgacgctcatcaaatcgtgttcttttgctagcacatcaaggaacagctgcatttaacataaagggtcaaacaatttgctccgcattaggcttcagctctttctctaaaaagtctttttctatcccatacacgtcattaacaatggagaaaactggcccagcgaagctaaagtctctccaggaacgctataaaaatgttcacttggtcgtaatagatgaatttagcgtgataagctgtggtatgctttactggatagaccagaggatgcgagaaatatggccacgatgtcagaccttaccttttggtggtcgtgacatcatttttaccggagatgctggtcaattagatcccgtcatccccttttcactttctacaccacttgagaaaatagctaacgacgttgaaagaaagggtcgtcaactgtgggaaaacattccgtacatttgtaatctaactagccagaatcgcggtcgactggacccagaatggtacgatgcgcttcgacgcttgcgctcgaagacgcctacacagaaagatattgatcttttcaacactcgcttgatgccgcctcaggactatcctcaatgggtaaaaaaggctagacatattgctcacttaaatgtagatgttgattcagcaaatgccgattgtgtctccttacacacggaaaacattgtccacatattttcccagcattttgttcagaaaaaagactacttgcacagcgcgatatttcagatattgctgtgcgacagcttttggaggacgctgtgcagactgattctagtcgagaccgagttgttccaccttacgttaagcttgccgtcggagcgcccatagctcttacattcaatatatgccagcctgcaggactgtgcaatgggaccaatggtatcctgtacgatctcatttttacagaagggagcgacctaccaattcttttagtgcagataacggattcaaatctaggcccgtcatttctatccgatgttccaaatattattcctgtacttccgaaagaaataagctggagtaagaaaacaagcgatgtaaaagttgttcgaagaggactaccgatccgtttggcatttgcaatgacggtgcataaagttcaagggcttacttgcgataaagttgtttttcattctcactcggtcccttcatgtgcacttgcgtatgtcgcgctatccagggttaagcacagaaatgatatcatactcacttccccgttaacacttgacaaattgaaaacatcgccagataggcttcaaatattccaggccgaggaggagagagtgaagaaagcagtactcaaaactgctgactacgctacagcgatcattgcatccatgaaagaggcagctctgcaacacaatatatgcatatagatccatgtgaattcgcaacccagtttgcgactccggtttgttcgccatcgcgcaatagcgcccctccactgttcaagatcgcccccaccgcgccatgtactactgcagcaagggcccctcctgttcaagatcacccccaccgcacacacaattgtggcctcaacacctctatacactacgagctacgcgccagacatccccgatatgtgatgcgggaacagcagtgggttgcttgctagcttggagaagcgtggggacgtcgtcaaaagtacgttaccgcacttaagaggtcggcccaccagcagctcgactcgagctgctcagctcgtatgattcatatcacgattggtcacgctctgtgattggttggataacatgatattttgattaggacatttgctctagcactctttgagacgacaaagacaactgtaacaatgccaacaactcttctgctctcttcgaattcattacgaagtgttcggttgcatcgttgcgaaaagacacaggctaacatacgcacgcagtgccatcaactcagccttcaacgcggaccacaacgagaccgagctcgcttgagtgcaccatcgcttagcatctcttgaaaggattccccaacactaacatgatccgaaagacaacgccgagaccccacgagtccgtcgtactgtcgatatagtaccctgagtgccgctcacacacataaaataaaaccgcagaaacattagcgctaccccataaaaaatcgccacaccgtgctcgttacttacctcctccacagcttcgtatgagtccgcaccgcccgccgccttcttcctcaaggttcttaccaacgtctcgcagaagaaggtcgggccggcgttggccgataccacagccttcaccttgccgcgtacgaccgtggggcccatcttggcgttgttgccgtggccatggtcaccgggaaggactcaccggttagcgcggcctggtcgatctgcacggggttgccctcgcatagatcgcagtccgcgggcacggccgaaccgaccgacagcgtgatggggtcgtccgatatgagcagtgcagaggaattggcaggcagctgcagccactacccgcaccgttggtgcggcgccgctcttggtgcacgtcgccgccctcgcctcgccgacgatgtcttgatggccgccacaaaggccccgttcacggagctcacgccgtctgcatcatcgttctcgtcgtgcgtggtcttttggtttatcgccattttcgagttgccgtaaatctacctcatttatatcgcaccatactcaagccgagtcaaagtgtcacggatcaacaggtcattcacggcaactgtgatagattcgtatcacaaccccctaccaaaagagcatgaccttatcacaaatgcaggagatgtatgtattggaaatgggaaataaaagtatggacacaaatttcgtctattggtaagtttcctgcttgtatcattcactccaggggcttcccgatgtgctgtcgccacttcagccagtttacagcagacattcaaaccatttgacgggcttccgggcgtctccgaagtgtccatcgccattcaggaacgccgtgtctgcatggttcagtgtgggcttgtagaacttgctcgtgtaggtggagccaaacttggctgcatcgaggccgacctggcagctctggaactcgacgagtccgtcattcttggacgacttgtgcgggatcagctttcctgctagaatactcacagcctggtactcggagtacagtccggcgtagtcgtcactgcacattgcggcactgacgttgccggcgtatgctttctgggccgcagcgtacgccgcgttcaacgccggtggactcagcttgtcgttctggtagaaggtcgtaagacgagacttggacgtcgggcattctccaagaagttccagtaatttactcgcgatcccagtaaactttccggtgcaaaagttctgaaggtagtccgaagccatactgcccttcatcggaggactcagcgccacccacgaggtcccagctccgaacttgcattttcccgttgaaagcgcgccagccatgaccagtccagccattgaatgcgtcacaatgatcgtgtcgtcgatcgtcttggagctcacgttgctggttttactcatagaaagcgagtgcgagcagtacttctgctgcagcgcatcgttcgtccagccaaaggcgtcagtattcagcacggcgtacttgatggacgagcagcaaggagcgtgaccgctaatgctgccgagcttccccgacaccagcttgggcgtgtcctgcagcagcggttcctcacgtttgttgcccaagccgtggaataaaatacacggccggggcttcgacttgcatccacacgtcgacgcagccatcgccatgtgcgacgcttgctccaaacttcttgtcttgggagctgtcgatgccacggggaccggcttctccactttagggcaagacttcgccgtgtcactcaaagtcggcgagggcaccttcacgggggtgttcaaatactccacttcaaccttcaagtcgctgctgtaagcggtaaaaccggacgtccccgacacacaaagagcgtagtctgtgccatcgaacgaagtctggagctgcttgccgtcggtacacttgatgttgtcgtcaccaattgacgcactcgagatcggagtcgcgtcgttcaccgactgcatgagagcgttgactggtacggggcctgacgacagacaccgggccgactgctctccggtagcaccggagcctttcgtctccaaataccacgcgccgttgatgagcgagtaggtaaactccacgccattctcgacgaacgtggtgtagccatcgtacagcacggtggacttgtcgctcgacagcactgggagggcgaacgtgtcgaactcggactgtccgtgggtggccgtagacttgcgcttggccgaagtgcggattctgacagaaggtagcgaagttgaagcttggttttggtcggccgtgacgcccagcagcgaaaccaaagcaagagccccgacaacaaatacgcccttcatgtctggaccgaggagcttccttcctttcgtcgggctggaaaagcaaaagtgagattgtggtgttggtttgtgcagcgtcgtcttgaggatgtgctttgacgaccatacgaggtggactttacatctgggcgcttctttagtcccgatgtatggcgtttacgcacttgttgaacaagccactattgttatggttttggcacttggtcttgagcggcatgtggtgatcactgcgctttgcctctcctgttttcaatcagccaacgcattctcagtttcggtttcggtgacatactgtaccacttttcagatcaccacactttaaggcgctggccgacaacgcttatcgtcaacttgccatgaatcgcagtttgacactcgtgaccgtacactcctgagtgttcaatcgatcgatgattactgtcgactactgtggctggaactccgcatattttcgattgctcgtggaagggatagcacgcactgtataatactgcttcgctacagtatctgtaagtgtaggaacaaaacataatatattacttcacgaatatgtttgcttcataaaaaatccgattttttatttcgcactcgttgttttcatgggataagcagtacatagcacacgcggttcagctcgtaggcgttgcatgtattattatatacactttcattctggatattggcatgatgttttcttcttattcttgcacttgcttccctattttctggccgtaatcaatatattgtggaaaccgattagattgtctaattgggatataaatcggttgattaagcagatgattaagcttaatcgggtctgatttgctaaatccgacctcctaattagatcgacagactaagatttgtactctgatttgacagagaggtcagttgtgcctacaacgccatgtggcaagctgatttagccgctccacggcttacaaagcccgggaaggctgatttgcatgctaatcagcccgaatgtccgacacccacacggcattcggcggccgatttaaagtaaaaccgacaaacgctaatgctgacgagaaatgacagcgcaaatacatgacttcagaacttgataaatagatagcagtacacatcgaagctcacagaagcgtatttaatacacgcgatgctatttctcgttagtaggtaccggtacgcgaatcactcagctcgtggcggtaagtggtcgctcgtcgtatttctggcgggtaatgaggcaacccccattttattaaccttacaccgatttatacccttaccaatgccatatgaaatcataaggattcccgatttagtaccagacaaatctctcatgaacgctgctttatcagctaatccgctcgggcaatttaatcggtttccacaatacaagttttgcttcgagtccacttcaccggcttcctcgaatccccaaacagtccgtcgccgatcaagaacaccgtgtcggcatggttcaacttcgctgcatagaacgtatccttgtaagtattgccgaaacctttagtcttaatccccctcgcgcagctctgatactccaccaagccgtcgttttctgaagacttgtgtggaacaatcttcccggtcgcggtcatgatcggccggtacacggaaaagaggcccacgtagctgtcactgcacatcgcagcactgacattccctctgtatgcttcctgagcagcagcatacgccgcactcaacttcttggtcgcgtacttcccgttctcatacatcagcgatcgtctagaaactggcatcggacattggccaatggcgtccagcaattccgttgcaaagtcactgatctcgtcgttgcagaagtcctgaaagtagtcggcagccatggtccccgtcattggagagctgatagcaacccacgacgagccttccccgaagctgcacttgcccgttgcaagagccatcgacatcacgagtccagccatcgagtgggtcacgaccaccgtgtcttcgataatccccgactccgcgtcgctggtttcgctcaatctgagggcgcgatcgcagaatttctgctgcagcgagtcgctcgtccagctgtagtccatcgtgttcaggacggcgtacttgaccgtggtgcagcacggcgcgtggtcgttcattttccccattctaccgctggtgttcttaggagtatcttgcagctcttccatttcgtggtagttgccaattccgtgatagaagacgcacggtcgaggcttcgacttgcacttgcatgtcgatgcctccattgccatgtgctctgtgatcttgagattcctcgagctggtaggcggaacagcattgccagtaagcaacgctgcggcagtcggtgtcataacgatagaattcgcttcagtaggacaagtcaaaatcgtccgattcaacgctggtgcggagaggttattgaggtacttcacttggatggtgaagtcgctgctgtaagcggtggggcccgaagatcccaagccgcacactgcgacgcgagcgccagagaatgtcgtcttgaacagtcttccactcccgcactcgatagattcgtcgcctattgatgcgctgggaattgctacgagttcattcagcgctgggcggatggtgtggaatggcaacgcgctcggagggatgcaccgaactgtttccgagttggtaagcttagctgtgtcgttggtcattacgtagcccgctccattcacaaacaagtacgtataggcagcaccctcgtcgataaacgtcgaatatccgtcgtacagcactctggaaccgtccttcgacacgataggcttggcgaagacgtcgaactcggactgaccgtgaatcctcgaggacttgtgcttgagtgtaacatggagtttcagtgatggagcgccagtcagagaagggattggatcttgatcggcgttggccgccgcaaacagcatcagagcgacgacggcggccactacgggtggaacgtgggtcatcgtgccttagtctggagtatccaagcgtgcactgagcggggtgcccggaaactttcgctcaaactgcagtcatagcctacaaaggttgcgtgcgatactggcaggtcaccagatcgtcgggtgtgcggcactccaacgtgcgcacaccctccacagcactcgtagtgacgcgcgggagcatgctgtcagtcaacgtggcctgcgctacatggactggctgcgacggggtggtcctctcatggtgcactcatggcgcggcggggcgaagaaaatcgcagtggcagagacccagatacggctgactcggggaaggtgacgacacgtcgccgcataaagcgctgctgaggcgctcgctggtggcctgcaacacattgagaagaaggaacgcaagtcggcccaggaaaatgcagtggagaactcaagcttcggagggcaggcgctgctgaaggagcagcgggaccgcgttcgctgtccgcggtaccaaatcgacggaagtcgagtagattgtttcaactattcggcggggcatcaggagatatgagctcggtgttgacggtggatgcgtcggtcgttatcttagttaggataaaggaactcaatctaacctcaaccttgaaatgaaatgaaaaaaatggtcccttctcagaggatttccaggatggggaggccatcactgtacagtagcagatcatttgcatcatttttatctaggaatgagatacaaagttgaagcacaagcatcaagaagagtgcgtacatttacatgtaccttgtattcattcggctggatgtcctagtttacagtaggataaactcggagacgtgctgcggttcatgagttttggggacatgcagcctcggtagccgctgtagtttgatacaacgcagatgggcctgaagctttggttggaagttgtcaagcgcctcgctcagcgtctcgatatcatccgggcctagctgcacgttgccactgagcagaagctcctcgagtgtggaatttccgggtgcgaactgtaccccatcgatagtttctagcgtgggcaatccaagctgggcgatgaccgtcgcgcgatcgattttcttcttggccttcttggcttggtccatctgtcagaaaacgaggaaattagcttcatgaagtaagcaatgtgagatcaactatcatgtacctgagcttgaatttgactctctgcggcgtctagttcggacaggagttccggcggagctgcgtactttgtcagcccgtccacgagaaacttcgctctaagcaagaaaaaacagttaggcaagaagagtcaatgcgatggtcctttcatcatgaacttacccccatccggagatcttgttgttagcgagggaaagcgtcttgagcgtcgtattgaacggtagagcatgcgcgaaggcacgtgctccagcatctccaatcgaattttggaacaggttcagagcttcgagtgtcttgttgttccggacggcttttgcaagcgccaatgctccgcgtgaggtgataccattagctcgcagcgacaggaacaccagagcagatccctcggtcagcagctgggcgaatatctccgacgcgtcctcctctcctcctgcttgtagctcttgctgcatactcagctcacgcttttgagcctcactcaactctttctcctggtcgccagcgtgtggggtgccgtggtgctgtttacttgtcactccagctgatggcggtctaaaagctgttcttggggctgaggggggtcgagtagctgcaggttgaggaggacttgagttagatacaggatctgcaagattagtctcctcggtgggtgcaacgttaacaggattccattccaactgtagagcagtcacgtgtgttttcggaatcgtcgagcacagtagtcctagctgctccttgcttaaccctacattaaagagactgtcgccataccaacactacaagtcagatgatcaatctcaaccaggcagtgtatagattcactagcgtaccagaccgagcgaaccttcgttgagagcgggagggcgtagcacaggccgcggcagttcccatcatcaagctgccagtgcttgatcgagatctgctccacctcactcacatcgtagatgttgctgctggacgaagcctcgctggacgcggcacctagacgttcctcttcatcaggatgcaacggaaggagttgtgggtgaggtatcaagttgcgcagcgtacaatacgccagcaagtctcgacggaaaacgtgggcaggcggcaacgcagcgattgctttcgtcacggcatcgttatccacaggaacttggcgcgctgcgttggcttcgggagaccacacgcctctaggcagagttccggagcgagcaaccatttatcttgacgacgaccccgatggagactgactgcgctgccccagcaaaaaaaaacgtaacggggacaagcctatacttggggacagcacttggccctcggccagaactttgacttcggaacgccactaggaagatgcctgcaacaagagcatagatatttatttagtcaaaaattgtgcgttccgccccgtcgggcaccatggcctgcctgcagcaggtatcggtaccctgctctaagtggcggggttgtgtatgtgcgagcaagtcttgcacttcttggagaaagctttggcgacgaactggtcgcatcggcatgaactgcatcgtccttggggagcagttgccgtcgatgggcgccgttgggatcccccagaagcctcgaattgagcgatcccgtccatggcctggtcaatggcgtcgtataaacactgggcagcgcgcggatgcgggaccgctccactcaaaatttcctctggcgtaagcttctggccgtagaagttgctgttcatctctgttcgggccgtgatgacagcaccgtggagcgagataccggcgaaaaggccacgactgtgagagtagctgtaattggcgttgaatcctcctcggctagcagcagcttgggcgactgcatcacgtccgtagggtccgacagccacgctcaacccgccaccaacgttcacctgagtacggtggaaaaccttgacggctttcttggagcccatgatgatcatgaactcgataagctcgccacctccctcgagtccaccgcctatacctgccgtgccaatggcagacggcgccgaccacgagccatcgtccagcttggcgatcacaatacctgtccccatcttggctgtgataagcaaccctgccttgataaccgtcaggaacgcaatgccttgggctcgcttgaggaaattcacggggatgtagcggtcgctgtcagccccaaagtccggtcggaaaaagttgccgaggatgtcggcagccgagcgacacgcgctctccagtgatcggctgtacggcagatgcagtcgcgtcttggcttcgtgcgggttctccttgtggcagttcgcgtactgcgagttgagtccgtcctggaagcactgcaagatcggcgcgcagatcgtgcacacgcgctgcgggtgtgctgggtcgtacttcttcttcatgctctcgctggccacctggtcaggcgagatcagcatccttgctggactgcacgagtggcagacgctggcgccgcacttcctgcagtggtgtctgcgccgcttgatatcgaacacctcgctgcagatggcgcacttgggggtgtctgcatgtcgcgtcatggcgagtctcgaggccgatgccgctgggaccatctctccgctgttgttgctggacgtgtcgctctcgatgctgtctcgtcgaatgagctccgacgccgagtacggtctcctgtctccggacggtctcattgaaaccggcagcggcgggttctccaccctccccgaagtggacacaggtcgtcgtgggtgggtggaggctctagcccccactgtgacgaccgcattggacccacccgcgcgcttgtgtttaacgtgaactttaactaacttcttcctcttcttgtcgtccgggatgagcctggccagctgcggcagcatgtgctccagcatgagctcgctgccgaagtagacgcccaggcgctcgtagaacacccgcgcgcgcagctcgccctggccgtactgcttgcagtccgccttgaaggccgccaccacctcgtcgtggtctttgttggcgccgcgcacggccgccagcatgcgcttgtagatggccgcggcctggtcccccgacgccgcgggcggcacttccacctctctgggtttgtccttgtccttgtcattgggtttgtccttgtccttgggcttcttcttcttggcgcgctccttgggcacgttgcgtcggctgatgccggccgaggtggacgcgctgcccaccgcgcgcgtggccagcacggacgaggaggatctggacaagcgcgcgccgcactgggagcaggcgcgcgcgcccggggcggcggcggcgcggcatgtagggcacgacgccatgcctgcagctgccgttatggggattatgcgccaaaaatccgtccagttcaattgaggtgaggttttgaccaatccgaggctgtttgggttgagtattttggcgaatcagactctgcgtcgtttcgcggaagatggctacatttgcgaaaagtatcatcttcctgcgaggaatgcggcattgggtgctggctgtggtgtgctttgctgcgctctggtggggcggggacggcattgaaactgcgttcgacttgcggttcgagtatgaggacccagagtcacttcttgctggccagacaactgtgggcgggcctcgactccgctggaacacgcagtccgttatcgctggtttcggcatggagcggggtgcaagggtggagctgcaggtgacagaactccacgttgctggagctaacaatgagacagaggttcctgtagtgttcacgttgtacgacaacgaccaatggcgcgcgtacgcggtactcaagctacgggaggtccacattcgaagcaactacgtgctgtgtcactacccggcagcaatgcgcttcactgttccgccacctgacccactagctgcacggccttggtcggtgtcattccatgtccgcaagccgagtcaatatacattgcaggcccaggtctgtggcgacgcatcagtgcacgtcacggtacggaaggataaattgtctaccggtggaagttgtacgctaagctgttttttgtgtgtgtgttcggcgtcagggccgcgcaagcatggtgaatctaggttacgacggcaagttatcggaacatttggggattcaagagcttgggctgcgagcgctctataaaggtgcagtgttaactttaaacatgttacttaagtattttttttttggatatttgaagtatcataatattggtgttttgcagtgctgtttggagtgtatctcgctgcaatggtgctttggatcttggaatgctacgttcggcgtcgcacggttccagtaaggaaattgattgtttgtttttgaaatctgaaaacaattattgagcacgctcacttgtttctcttcgtgcagaaaatctgctatgtgttccaagcggcactacaagcgaaagcgctttctgtggcactgaaactcgcgttctacagtgcgcgtagctcgcacgggaagataaacacgactttggatattgcacaggatgttggagaaagcgctaccagtgcggcactgctgggtgtatccgtcctcggctcgctaggatggtcgatcacccgagctcggctttcacgacgagaagcgttgtcactgctactgctagcggtgatatatcttgtcgtatcagtcaataaggcgacgtgtcgtcctaccgacgcgccgcaatgccgcggattcgtgctgtcggagtacgctctgcagtccatgatgatgctgggcgtgatcgtcgcgctgaacttcactatcgcgcagctaaagctggcagtcaattacgagagatggaactgcttcgtgacgcctctcacgtacatgaagctcgagcaatttcagtatggacggtgtggttcgcactcactccaattgcagcaaccgggctgactttatggtttatttatgataggcgctttcggtttgttttcctcggctacctgttgatgcctacattcttgctacttttgaatgtaaggatttgttgctggggttggcgtgggtttcattttctaacgctggctgtgccattcagctcttggtggtcactccgccaggattctggcggtatgtctgggtaaacacattgctcgcggaggtcaccaccctagtgatcgtgatcaatattggtctggtcgtgcgcccagtagatacgtacatctacacgcgggtaagttgttggtttactttacttgttgaatcggttctgtactgaggccctatcgacgattcgatgagtagatagcacgcagcacagctccggacactcctaaccgtgacagtccagacccgatcgagcccccgccactggaaacacctcaaagagacgcagttcgacctcaaacaacagacgcagcatctactggagctgctgctccagctccgatcgagtatcctagtgtcaataccgacgcgatgatgagtggcttggctgccatcgagagcaaccgataagggttggaggtacacgcacagcaatggacatgaacgactgtaagacttatgagtttgaccaacgaactgaccgtgcactcacttatgccatcgtaccaccaattcctcttcttggcttgacactgatagccttatggtcctgcgccagtagcccatcaatgtctcgaccggcaaagcgccttgtgagaccgtggtgccatggacacatgcaagtcgttttgaaacatctcgcgcggaaacgattaaaaagcgttcaaactgcaacacgtgaaccggtgatgtcacgtcggaatcagcgtggcatagtttacgcaagtctcttgcagcgtagaccgtcatctggtctggtggggtcccacttgggtcaagccagcctccctcccatcgtggtctgtatcaacgtctgtctggctggtcattcgcacttccgctgcctcacgacaccagcactacctataaggacgacgaccatgggcaacggtgtgtctagcgagatggaaatcttcgccgagggcgagctggaggcggagctcaagcgcctcggcggcacgggcgatgccagcgtcaagcagctggtaggcaagggctaccgcgacgtggtgcagctcgtgatccgtcccaagcgcgcgcgctacagcgtgcacgagctcgggcccgagcgcttccaggtggcggagctctccgtggacccgacgcaggacgacgtgacggaggccagacgcagagacttcgacctggtgaacgaccgcggcctgcgcgtgtgctgctcgcactggcagctcttcgcgcggggcagcagcacgccggccgttacgccctgcctgatctacctgcactccaacgtcggctcgaggctggacgctctgcgcgtgcgcgacgcggcgctcaagcgcggcttctccgtgctggccttcgactgctgcggctcgggcctgtcggacggcgtgtacgtgaccatgggctggaacgagtccgtggacctgctggccgtgctgcagagcgtggagaaggacgactccgtgtcggacatttgcctctacgcgcacagcatgggcgccttcccggtcgtgaccaacctcgctagtcgcgcggcgggagctgccaacaagaagatgcaggccaagctgcagacgctgccgcacgtgctgcgaatggggcaaggccccaagctgctcaagcctatccgcgctgtagtgctcgacagcggttacgcgtccatgaaggaggtgaacgaggggctgctgcgggaaatgcagcaggagggattccccgtgcccaaggcagtgatgaaggtggctgtgacggctatcaacaagagcgtcaggaagcgcacggaggtggacatcgaactgctgcgccccgttgacttcgtggagctctgctatgcccccgcgctgttcgtcgctgcaaacaacgatcgctacgtgtccaaggagcagagcgaagaacttgccagcaagtatgctggcccgtccaaggtcctgcgcgttgagggcgagcactacgatgctcgtgacccctctgcgtacacacaggcggtagacttcctgtacaacgcgctgcacccgaagatgccgtagatacatgtagtgtattagataggacagcaatagcaagaatactcgcaaagcgagtcgaatgtagtaacagcgagcgagcgttgcttgatcgtgcatcatgtttggtccaatgtccttagcaagcactcgctttggaaacaaataaaatagatacctcttccttctctcccgacgctctctcgcttagcggctgtgatgtccgagggagaaaccgtacatgacgtccacaaagtagtcgcccgtggagtcgtcgctgtcgtaaagatccatgaatcggatctgacgcgccggggagccctcggagccggaactgcacgcgtagtcatcaacgaaatcgtactccatcatcagggcgcgatcttcgctgtcaccaggcgagctacacctattgttcgcttcacttcctcgacgcttcgactcggcactgcgttgccgctcgaggcgtcgctcctcagcctcctgcagttccgcttcaatctctccctggtagtattgacgcaactcgtggagtgaatcgaacggaatcgttcccaggaaggacttgtccatcgtcagcctcatcaacgtatcacacacgcactcgtcccgattcagtaggcctgatcgataaggtgccgtgagttcctgcagcgtctcgtgcgaaaccttgaacatctcgtacacatccaacgcgtcatcacacgccatgatgcggggctggttcagcttgagaagcacgagtcccactcgaagcagcacgtggctgccttcacagaagaacacgtcccaaatccgcatcaccggctcgaacggcaacgtgttcaggaagaggcacaggaaccacttgagcgtgaacggctcaaagtccacgcccagcgtttgcaggtggttggccagcacgggcagcttctgcgtcaccaaatctgagaagacacgctggtcagcacgacttcccgtcatcgtgcgcgtgtggtactgcggcgtcagctcctccacgatggatgccagcacccagaacgcttcctcctcccccatctgctgcagcagtactgcagcaaggaagttcatgctctggcagtatccgaccgtcgggttgcgtagtgaataagcctgcagcacgcggcgtagttctccgaagtggtcgccatcttccgacagctcctgggactggcgcatcgagctgcgcagcgagagcgggaaggtccgcggcaggtccttctcgatgtccatctccgcgcacttgctgagcgtgtgcagccgatgcagcagcgccgggtacgactccttggccgcgcggcggagctctgcggcgccgctgcacatccaccagacttggccgcgcagctgcggcgacacgccggccttcagcagcgcatcgaattggcgcgagtgcagcatgagctccgccgccgtcgcgaaggtggagaaggccatcttgacgctcttgcccgccggtgccttcttcgtgttgctggcgtcgtctggcgcctgttgcgtgaagcgcttctggttctccttccacttttggcacacgcgctcctgcgcccagtcgcgcgcggcgaagcgctcgccccacttgcgcaggcggtacctgtacaggtcctcggccgtggccagcgcggcgtccgactggtcctgcgcgtccgcgaggcactgcagcacctggcgctcgcagtggcacgccaggtcaagacgcccggctgcgacgtcctccagcggctcctggagcgacgccgccttggccagccgaaagcggcgcttcgggcggaagcacgccaggtggcggccgtgcgcgcgtgcagcagcgggaggggccgcgtgccccgcgccgcccatcgtcgagccgtctagcgtcgtcgtcttggcgcgggccattgttcctcgaggcggtttattttcgcagagcgttctgatactgtcaaagagaaggtcggaaaagtcactgcgtttcaatatggcgatacgttctgagaggctcgtgaactcaacctgcatgtgcattgaatcctacaggatacacaaattatacaagatgtccaaacgtaccatgaaaacggaacagtagcgcaaacgaccatcactcctcttccgactgcaagtggatcgcagcgcattaatcttcttcttgcctgctgctctctcgccatgatgctgcggctacctaccctggccccgaaggcctcgcgcccgctgtcgcgcgcactacacgcctccgcgccctccagcttcctcgtgcgctcgctggaggacgtgcagcagagccgccgcgtgatcacgagcgacgacggcgccctcgagacgcggtacgtccccagtgtcttcgtctgccggaaggaaacacaagagtgatggttgcccactgacgcccgttgtccgtccgtggcaggcgctacctggtgcgcaacgacgagtgcggcttctctctgcagcaggaagtgctcaagaagggcgcgcccgtgcgtctcgagttccagaaccacgtgtacgcgctgctggtgacgcgcggcagcggccgcgtgcggctgctggacgtgggcaagggccagacgcaggacgtgagtgagggctcgctcgtggcgctcaacgccgccgaggccgtggagatcgaggccacgagcgacgagctgcacgccgtgagcgtcatgaacccgccggtcttcggcgtcgagaagcgcagccccaccacgggcgtgttcccggccgtggacccggacggagaggagctcgagagcttcgacctctccagtgtggacaggatgttcacggcgcccgagtcgctcaagggcggtagcgccccaatgaaggacgacccgctcttctagaggacgagacgctactaaggggccggaggtgagcgatcgatcgatgccggacaacagagacacacaaacacaaatagcgaactactcgactcaacatgtatgagcacaatacaaggctgcaatgcaatgctaaccaggcttccaagtgcagacagggtacgagtttaggattatgtgtgggtgggtgcttctagccgcgctgggaaggtttgctgcgtttcgcattttggtgagctgcagcttcaaggctggccaaggtctgctggctgtcgacgccttggcggagtagcatggcgatgggcttcaacccgcggctcgtggcgagctggagaggggtttggcctgtgaactgagagcagcgaggcgtgagtcttgtagggtgaataggactgacgagggtgacggggactttactttacattgcggagtagcgggttggcgcctgcgagcagcaggtcttgcacgatatcccggcggttgatctcgacggcgacgtgcagcggtgtcgtgccgttaatctgtgtgcgtgctgtttagttcagtcctggcaagtgtctgctatggatgtatattataccgtccgagcgttgacatcggcaccagtgaagagtaaatgcttcaggagcttggcgtggccgtgatgcactgcaacgtgtacactcgtctgctgccaaagctacgacagtgttgaggttttctgcgcaaagactgcaccttcaaggctacgtactccgtgtggggtattaacctgcgctgcacctgctgccgtcacgagcagcttctgagctgccacggtgtctccattgtagatcgcatcccaaagcggcaggcgcttgcctccttctggccaagccataaagatccgcgacgtttgtcaaccggcgcctagtgacgctttgtgcccgtcgggctcggacaagtcgaaggagcagaaagatgaacgagtccgcgtccaagtcgagcctcgcttcgtccggtgggaagccatccacagccaacagctcgggggctccaaatggccgcaagacgcgcacgattatcgttgcacgagcgattcctgatgagccagctaaggtcgtgcctgctgcaactcgtggagagggcccgtcagccgtcgtgaaccagcaccacagtcgagacgctcgatccggaaagctggcttcatatgcagcactcggtggcgaggaggatgtcgaacgcttcgaccgcttcttagctgagcagcgtggacaccccagtgcatccgagctgcgtgcggcagccacatcaccgcagcacatgatggcgtccatgaagcgcaagacgatgagtcgaattcagctagacggaatcgatggtagtgctgaagcaaccggggaagacgccgccgctcggaagttgatgcagcaagagctggaaaacgatgcgcggaagcgccgagaggaggcggtggcacatcggaaatggctcaactcactgccgatccacgagcgagttgctcaacaacgccagcaaaatgtgctgcgtaaatggcgccagatgaaccgcgattgggaaacgttcaaagttcgtgcggcccggcggctaggcaaagccccgcaagaacttgtgatgagtcgagctgcatcttatcgtgagcagcgtgaaatgtatgatgcgttgcagaaagctcggccgctgagtgacaaggttgggggagatatctggctcgtgagtttgcgaaatgagggcacacggttcgtccccgtggggaacatcttcagtggactcttttgccccatccgcgagagcacaaaacttggtcctcgagttcgacgcccacttgactatcatgacaatcagcacgaggcatcaagaccattgtccaagctcgaaaagcggtccctggatctgctagcgcgaaagaaatggcgcctccgtaagcagctcgaggtgttgcaaccccacgaggtggagcgaagtgccagtagtaacctcgctgttggcacagttgatttgtttgcgtgggcatccggcacattggaagacgcaaacagtgataatgatgatggagggtccattcgagcgtattctgcagatgacgaaccctcacgccgtcgtcgacttcgttcgtatgccagtcctccaaagtcggtgaagaaagtggcgacaagcgaccaatttatcggaccgagtttaagaatcggctatgttgcggatgaagatggcgtgccgaacacggagagcaatgacattagctataacgccgagccatgccatccgcctcttcgtttgagcttttacactcccgtaggtgaacaagaacagcgatcgctcgcgcttaccaacgatggaagtacgattgttcattaccagtggtggcgcgctccattcgaggacgaacacgcggagctgacagcccatatacgcggacgccgcactcgcaaggaagaacaggagctggagcagtgtacgattacttcggtatccaaacttggaggcacactactgcctggagaaactgagcaatttgtgttttctttcgagtcgtcccaagccggcgtgttcttggaaaagtggctgctagatgcagacccccagccccgaatttgtttcggagcgactccggatggcgaagagattgtgacctcggaggatttacctgttgaagttcgattgagttgcgtcgctgaggacaacttcgctgcttggagacgccgtgaaatgcagctcacccgtgtcgaggaacgagaaagtcactttttcgttgcaaacctcgtcgatgaaattctggacagcgttaggcctccagagccagtcgtgtttgccgagttgacgccatgcactgatgtcaccaagttctacgaggcgaacgggaccactgagttcagcgacgtatatttcagcccagatctggtgcgttcttgccacgagctttacgaacgtgctcaaggaatattactagctcttctgcccgtccaagaaccagttgacgaggaaagtctcaataaagagagtggagagagtcaggagggaactgagaccgctgaaaggcccaacgatgcacctcccgtggtatcatcagagcagagtaacgacgcgaatttgggggttgaagctgacgctcagcaggagctaaccaagagggcttcactcccagcgcttcatgttcaggagtggaattggcgtttggaaacactccgagagctttgcaaaaaggctgatgaagcgcaaaatgcccagataggtcgattgacgcaacagttaaaaaaggtgatcgaggaagttgaagaggatgatgagaatgacgacgaagatgaagacgaaaacgaagaagcggagaattcagaggatggtggtgatggagaaggaagtgagactggagagattgatgctgcaaaatctaaacgtataagtccccgtgaagcacgtaagaacgagagacttgctcgtcgtaaggcgttagaagatgagatatactcgctggtgccgaacctccaagaggcctttgatactatgcgcttctcggcctacatcgctccatacagcagtaggcgcttgcaggagcgtttgtacgagaggattgggagcttgtgtggcgaaactccagcagtctgcgagatcgcaaaggcaacgaatgcagcttctagtgcacaagcagctaaacttgagggtgtgggggagttgataatgcgcgctatcgacgaggctgttggtggagaccaagaccatcaagcgctgtttgagcagaaacatcgacgaaatcagaagatgtggctgggtgacaaggcgtcgtacttgtcagttagtcagttgatgataaagcccccagcttcgatcaccgaaccacctcatgactcttcaacgaccgatagcactggcagcccatctctgcctaagagtcctgagattattggcaattctggggtactattggtgcagctggacttagatctagcgtcgtggttttctttggtaaagctggaaacccgaggaactgccgcaccggccgatgaagcttccccgaagatcgaattggcatggcgtttttcccaagaattggttcaacacccgaattttgttcccgtaaaagttgctcaggccgcggaatcgctgttgaaggtgctagatgcgctaccgagtacgaatccacttgtccacacagtagtgatggtaagcgagttaagtcggccgcctctgacaaaagcgatgcacaagttactccgcaatgttgcccgacttgaattgagagccaaggcagctgcaacaagccaagccggtggggagacagaggaaagcaagggtcgagaaagtgacgaaggtgaggaagaagaagtggcagtgatgaagacattgctccagcgcttggaatcacaactgtctctccggggcgctgctcaggtaatgcagcgtgcgatccagaaggacgttgtattttgctctggggttgaggaagtgcaggggcagattgatttcggacgaaaagagctactgttgaactcgtctgtatcgcttggtggatttgagaatgaagctgttgggaaagaggaacaaacggattcggagcagcaggagacagcgatcaccccgagaatcttgttactagagcatttagacgcggctggagttgatctcatccgacaagccgctcgaaaacgtgagttggcatcgaaaccggcgacgccagctccatccgaacctcagaagcctgcagcaggggcaggaaagaagggctctgtcgctgccaaaggaaaacctgggacacctggagcgcctgcagctcccatgtccgcacctccgccagagactccaccgccatcaactcttgatcttagtaaatttgagctcgctggaaagactctgagtgaaaaggggaccatggcactgcggagcatcttcaccagtatgatcagtgcttgtatcctcgatgggattccgtccaagtcatgcgaaggagtatttctatttggctgcaaggaagaggcgtctctcttgacacctccgacgttaacgggaccaacgcttcaccaggagctcacagtgtggtccagaatgttacagccagagctacctggcagaccaaaaggcgaagtacctcggttacttactgcagtcgtcggggggaagtgtctggagtcgaagctgcggatgattgatggtctgcttgagatcgttcacgaaatctacttcgttggtgaggtagccatgagtctttaccgagttctgcatacgaagcatgcggtaaagcagcttaaggggatctgcagtggcgcggaacgtgaggaagaggaagaacaacgggaagatgatgcggaggtcacgcgaatagaagggattctagaagacgaagctcacgacaatggtagcgagaaggagccgactgggcatcttccaccgggtaaagcaagctctaaaggtatctgggatctccttgtgccagcggtggagaagattcagcaaaaggcaagtcgcaagtgcgtgcgtctcctgctgccaaacgattgggttgtcggtgagacccccatagacgagcaggatctcagcgctgctatcgtcgtggaagaagaagacgacgacgatgaggacgaagaagaagaacaagccgatgaagtcgacgacgaagacgagactaggaagaaaagtcgaaaacgacgggcatcagaactgaagtctgcaagactaaagcccttagtggaacctgatggagtagactttttcgatcgaaaaaggctgggcgcgtacgaaggcgagcgcgcacatgtcgtgctcaatcactcgtccgaaagtggttggcgaacgttccgagaggtgacagcacaatgcttgccaaatgctcgcgttactgaggggaaagcaagtatgttgcattcgctgtggcccgactcggaagctgatgatggagaggaagacagcgatgacggagcggctcacaagattcctgtgagtagatttgagcacgagtggacattccgcgcattggatgtggggccgatcgcgatggaaggactggccaaagcgctggagcaagaaacttcacgtatcggattggatgcatcgagtgctagcgatgatccctcaacggcttcaagggcacttgttgttaatggtgtatgcggtgctgtggagttcctcgaattctgtgctgcaacgaaacagctattggggattctacaactctacaaaccgtgtgacgttttcattgctggagactcaacagccagttggattcaacagcttgagattgagcagctctacagcgcccaagcaacgagcgacacaatactgggcaacacggactctgaaaacttagctatcccacggaaagtggtaaacgatcggacgaaacgcaacgcacgagttcttaagcaacttctcgcttctaaacaccatccagtgctcgctaatcttgcatcgtaggatctgatgcgtataaactaggaagattctagttgaatgagaacacaacatggagattttcattagttcaacgaacctctagaacgtgtcggtggaactctgtgatcgataacttgttttatcttccgtagcaccgacaggaagtccgccgtttattcgcagtttgaagaactgtcgattagggaaggtgtttggatgtcatcgaacgatatccacgctagcttcttcccccgcggatgtcatcggataatattcacacgacatcaaatagcactcgaacgaatccggtctgattgtctgattgacacttacttaagtacaggttttgatagatacctattcgcctcgaagctataaatttaaaatactttttttatttttatctagattgatgtcagatgtacacgataccatcagagaagatggagctccaccggaaacatttattggtggaaagaacaatttttgctaatacacaatatgttcgttgttcggtctctgacaatttgaggcgtcggtgctaatgatgctgaccttgagcacaactggtgccattaccacataactgtattgtattatactacatgtagcttcaaaacactcaacacagtacttactcatcccattagcgttaaaattatcgatttgaataccctactctctcagacagatttttcttctgcatgcatagtttctcagaaattgtaattgaaaatcgcgtagtcacatgaatttgccgtgacataaattgtcggcaggctggtattgtgtgaatccccacagtcattggaatgagtccggatggtttagatacaacattccactataactttgcaagaaacaacttcaagtttaaagtttgtgtgatccaagatgggaagtatcgtttgtttgttttttcgttcaacatatttttatccaaagcaaactctatccgccggcaacgcggtgacgtcctatacgtacggtggcgaatgaattcatttagcggtgactcaataagagctgcagctcatggtatgtcttctccggatgtatgaaatcgggagaagtctagttccaattaatcgagctatgaatggctcgtgtggccattaaaaagctagctgcaatcgcttaggaattttatctacgaagactatgaataatttaagcttgccttgtgtgagactacattgtgtcccgcagagacctaccgagcccatttactactggtggtgtagaataatctactactggatcctgttcttgtcaaaacatcatatcatcctaatgctacatgaatacggtacgctcagtttaatacttctaagtacttgataaatggcaagacccatttggacgaatcgaggctgaaagctttttgttgttgttagatattcaggcgacccggacgaaatgtgtttgcggctgcgccatgtttttttcaaatagaatttgaatcctcctacgttgtcgctgtacgccccggattcctgtacgagaggaaaccggggcggacatcgtcaaagcgaagggcaagcacccgatgtatcctactcctacgcgatcgagttctgctagacctcagttttgacttatcaaacttgaaacgaattgctggcttcatcgggtcaccctgcaagttcggttgagcagttagcctgacagcgctaaatatttgttttatcgccacctgtaagtttccgatcccaacactgcaatctaagaaataaaggattctgcctaggcacagcgcacatttcagtggcaggaaggaaggaaattattaatacgtggattcagaaacacgtagcctagaaactcctgatgattgacgtttccgagaagatgatagccaaccattgtctagaagcgctgacaacgtagtggtagttcgagaccgatctgcgtgaagagaagctatttgaactgcggatgctaagcagccagtgctcgcgtatttttaggggtgaactgctgtggagaaaatgagggcaagacctctcaagttgagagtctcaacgcggaacaagatgccgagtcatcgttatattgtgatattgtaacgagtctgataacgccagctcaccagcgggtcgtcgctcgtagtgcttttactgcgtcctcgccaaggtccgttgtggtaaggatctcgatactgcaacttcaacgcatgctgggcgacaggatctccacttgagtcctgtgccggaacacgtccgttcctactttttgtattactactcgttcgtcagttagtactcgtacaactcgtacaacacgttcgactcgttcaccttgcctagatccgacgccagccgtagctaacctcaccccgcacactcatgcgttatcagtctgttggctggcgctgacacgcaggtcttcgcccgcctcaccccgcactcatgcacgttctggtctgttggtggctccgccatagcgtcgtcactagccgcacttcactcgtcgattcgtcagctgggttgtcgacagcatctcgcccgcctcacccactcgtcagtcgttcgttgtcggcgacaacccgcgaaggtcgccccttgctcagtcgtctgcgaaggtcgtcactcctcgctcgtctctcatcgtcaccggctgctcgtgctcgccagtactcgtcttctcgtcgtctgtggcccgcgaggtaggttcttcactgagcggtctcaagctgactgcgctctcgcatccagccactcaccgctctccgtcttggatcgctgatctcgtcacccggtacagagtaccgtacctgttacaatatcatgagatttgataagttcttcgaagttcaaatgcactcgccgacaagctactactctacttttaagtaagaagtggccaaagcattgatctggtacacccgcggacatgtccattctcgcagaaaaggatacggaaagtaacagaggcaagcgacttgagctacgtgtaatacttcccgcgacggagcaacatgttgaagtttcaagcagttttactaacgctgggggtcccagcccaacgctacttatataggtactatacatgtgtacatacatgtacaggccattgtctttgttttatattgcctgtgttcgttcttcgcttattgtgcctttgcacttacattaaaatgcatgacgaacaagcagtgacaagttctaggcacccatctcgctttgctatcagtatgaaacgacgaaacgagatggggcgagctgtaccccggcttttttaaaaacaaacgggcgacgcaagcacgttcaatcccacggcaaaatacaaaatatgtggcggtaactgacggctccgctcccaaccactttcgactaaatccataattcgatatcttgtcgtctgaaagattaagaaaatgcgcaactatccaagcgggagcagtagtataaagcgatcgtggtgctttggtcgtaacgatgcagaggtgacgctctcaaagctacaccgcccaatctaaagtcgctttacagggattgcgaacagagcatacgcggtggagcggttcaaagagttcatgctaaagactgtatgagaagttttcaactcaccttctacgtaacaagcacaccagggcttaagttccggttacagggagtcgcgggcgcttcgacatcaagcgctggataaatctcgatgacggcctgctccgattctgacattttgtggagatactgcagtccattacacccccgtcgggcttccgtgacggaagtaagacacggaacttccgtgtcttacagaagattacttttacagaggttatcatctgtatcatctgtaaggagctgatctccctaaattagagacggaagttgctgctcttcagctttttggtggggaatccaagagtgacggtacctgtggatcgatgcggacgtaaacgcaagcatggctgtatcgtgggggtctggaagcgctactgcttcagaatgcagcgagcagtgaagaaactaaatcccgacaaaacggatgatgatttggatcttcgcaaggcccaaggttgccgagccaagtcgctttccatgggtgtgcagtctgaagaccacttgaatcttctgttggatctcctcaagctgaagcaacaacaagaagagaatggatcttcaaactccaagctcagcccagtcctttgctgttgtgcaccgcgcccagcgagggcaaacagagggacctgaccagtcaacatcttcatcttcagcaaccctacattcgacagcaagtacctatcatgcaaccggttctcgaatcaccaaggtctcaaacagcagcagacgcagggcatgaactagttttcaagcgtacaatgaggacaagtgggtgttcgtgcagccacactctgcgttatgctctagcacagaggatagagagaccagaacatagtactaagcgtcatggccgatcgatgagtggtgcgaagtcgctgcatcctcagcttttttgcctcgtgcatttacatatagccactggaggagttatcatcgcgtaaataggaggaacagtttcgatagaggactcgctccgctccgcaacgcaacgagtcgttcgcgaaaatactcgacgatctggtctggcctcggccgaaaccgcaaaaaccacagcgaaatgtatgaatgtccatgcgcgccaagagcattcgtaactcttacgtgaagcctacaacttcatctggtcgaacttgtttcttgtcactcatttctcgacttccgcccgcccagcaagaccttaccaccgtgcctggaacgcctgcaactccttcaacgcacgacttaattcacccaggccaagagccgggaaatgacaacgcattgaacgatgagactgtacccaaaactcgacggtcatcggagcactggggcaatgacgaggttcaagaaggtgcatttgacggtaaggctgcacagacagcgatcgagacgcggcacatcagccaaacgcttcagtctgcgcacttctcgacagctttagaagaccgtcgtcagctgcacctcccgtacgattttccttctcagcacggtgaagcagctacgacggcgtctacagtggcgcatcggtaacctgtctcgaccgatatcacccgtgggagagctgaacagctttagagagctcgtagtctttggctttgtagttttccagatcttctacgtcccgtttgccccgatttacctgaaccacggcgagcaatcccagcaaagcacaaacattacgatggagctggtacttcttggacacaccctgctcaactttaacacggtcatcttcgatccaaaatgcttgaccttggttgaggatcgccaggaaattgctcaaagatacctgggtagttcctttgtaccagattttcttggctctcttccactggagttgatctcgtggctttcgcgagctgacggagacactcgaactttggcagcagcgcatccgagcgcctacattgtcgaaaaattgttccgaattcttttgattcggcagctttgtcgacttgggaggccctcttgggtccgataggcaaaatatgccagacgtcgggcggagcgcatatctcggtactcgcagtatcagcgaagctattcggcggaattgtcgttgctgcgcactacctcgcgtgcgtgttacgttgtcttttgaacactttccaggtcgaattcagttcggagacgccagtagctttgtacgcccgagatctgctccaagtcgtatcaacactgttcgggaacggctgggaaacggggcacccaaaagccgacgcgtttggcgcctttctcgtgcttttaggtgtgatgttgactgcctacatcacgagccgggtggccatggagatgctactggccgcatccaggagcaacaagccgccaccaagctcagatgtagctacgccgccactaaaaggcaatggatttgagcccgttggcacctcggtatcgcagcgccgagcactttctcgaaagcccactaggctacctggaatgcttccagatcccatttcgttcaagactcagcgctcgaccttgtgcgagtcagccgctcgaaccgtcgagtctactttctccaaatggagctaggcgccacaggaaccagcgcctccaagcgcgagcgatgccaacgagtctcgcaccgttagcgcaccaactgtgagatcgatccggtaccagagcccgtgccgacttgatccccacgtcaatagctgagaactcgttcaaatcctgctcaatgcaaaagaagaagaaaaaaactttaattccttccttccttccttccctctctgagccttccttcttgtcttcttatatttgcaactcgtggggttttgcgctcgtatccccctgtaaatctgcgtcccgatgaagcggagaggcaccttttgacccgaccatcccagctatgcatcagtcttggcactgtttcctgcaaccccgctgctcgatgagccagaggcgtctcccgagtccagagcctccaccttggtcacgctcagctcctcccactggtccgagtctgcagtaatagtacacaataacaacattagtttaattgatgcgataccagactactaaggcagcaggcagccgacgcactctctttcttccagcacatgtagatgaccgcgtcgttctgcagctcgtggtccgcgagcgtcgccgcgtccgcgaactccttgctctccttctggttgagcccctgccagagctggatgctcgtgggcggcaggtggaacagcgcgccgagcttctccttcacgctcaggaacgagtccgccgtctgcacgtccaggaacaccgtctggttccgtcgcttcacgcggatgtacggccccatgctctgtagtactttacgtagtactgtatccgccacctcgggacttccgtttgtctgaaatctacgtgtcgtacacaaaacccatagtttgaagtggcgcaccaaaaatagatgattatcaagttctgctttcggggcccgctggtttgtcggttgtggagtgcgattgcagccgcgttggtgcacggcaagcgcagcctgttgacgtgtgtctgctgcaccgcatccctggccgacccgagcgtcctgagtgagaggtgctgaaagtcgtgtacttgctgtctgcagagctgtaggcgtagcagagttgatctcagcacgaaggtgcgggcagaagacgaacggaaggtaggagactgaggttgccttggcagaatgccgtggcgggaacaaccaaggcggcggagctggttgtgctcctgctggagaatgcggaagtgagtgccgaactgcgcagcagctcggcgccgccgccttgggacccttgctcgtgttgaaggagtttcctaaccgacctatgctttgctatgctggtaggtgctgttgctgctgctgaagctgctaatgtgctgcgtctgtcagttgctaaccgctgccgcggggggcaacgagaggtagcgacctcccacagtcgcagcggtttctgtgctggcgagcttcgcctgcgaccgcgtgccgtgtttccgcgctgcggagcactgcttggtggcgctggtaccgctggtacctcacactgagccgtactgcggcgtctgggcggccgcttcctgcagccacagacgagcagctgcagcgagtgcatggagaggtgtgcacgtggacatggcgacgcgcatgacggcactggacgcgcgctgcgagctgctgagtgaggacggggaggcctatatgtcggtaacggaccgaaagggttggatccaaagtcacgcaatggagtgacgagtcttttgcaagaggtgcgggcacggtgaagtagctgtccgggggtcgagctacctttgccttatgaattgggcaacttcattggtcaatgaaaggtcgcagcttcaacatgatttgcgtaccagcgttattatctagttctgaagcgcacggtgccttcaccagatgccacatgaaacgagcagcgttgctgtaatgtatcctcacagcgcgggtgctcacttcgagtacatgtacagtgtaccatgcagaaatgcttgacacgctgcgtgtcaagcgtgtggataggaaggaccatgtctgccaccgcggtcaacatgacgtggccgcaaactttgactggcccagacgttgtgtaaccctcgctattatagggcacttgtcacgaccgcatggttagagtggtgatgtaaagaacacgggaaatattacctctacaaccacgtcttcacgttatggagtgtcgaagtccaggatgatagcaccattcaaaagataatgcgtgttgcttcggtgaaggagtgctccacttcgttttgagtgaggtgtcacttcagtctttaagctagctaaaaaccaagaacatgttagttctccacttaatgggaccgcactctgtttattagggagtaaggttagttgctgacagatactacagtaggtccttgataactacgacataagctacgaaaattacgcccctgaatactgagtacgcttgaaattaagctattcatttgagagtacagtacaatgttcactgattttgggaaaatcctctaaacatgtacttcgaggtactacaagtgcacctctcactctccaccaccatctcagacaatatctactgctaatacctggtagtatctaaaaatggcagaccccttatagaatcacatgcaatataaaaggccccagctgcagcttgtatgtagttgaatcaaggggccaccgttacgtggtcggtactatcccccacctgaccccacatggtcatcttgaccacgtatcgggataagttttggtcaccctggccccgagatccaactgcctactccccacggcaatggacatggagcccccgacagcgcctaattgcttgggtcgcccgaacgtgtccgtccgccagtctcattctccaaattgcgctcacccgctcaataccctccgctcgctctaagctatgaagcatgcgctccagactcgctccaacgagtatcttcctgctcttcagcatcgtcgcactcttcctttcggcgtccgttgtcctcgccaaggaggagatcctctccgatgttgattcggacgcgggcctcaacaccgcgcaaatcatccaagccagaggataccaagtcgagctccacaaggtcacaacgaccgacggctacgtgctcacgatgcaccgcatccccaagagctacgacgaaacgcagtcgggctccgctgccgccgccaacaagcccgtcgtcatcctgcagcacggcctgctcgacagctcgtacacttgggtcctcaactaccgccaccagagcttggccttcatcctcgctgacctcggttacgacgtttggctcggcaacaaccgaggcaccacgtggtccaaggaacacaagtactacagcaccgacgacgagaggttctgggacttcacgtgggaggacatgggcaagcacgacctcccggccatgatcaaggccgcactgagtgtctcgggccggtccacgctcagttacgtcggccactcggaaggcaccacgcaggcgttcgtcggcttctcgcacgaccaggagctcgccatgtcggtgtcctacttcggagcgctcacgccagtggcgtgggctggggatgcgacgtcgccggtcttcgtcgcgctggccaagacgtacatggacacgtgggtgcaggccttcggcgcgaaggagttcctgcccaacaacccgctcctgcagaacctcttgggctccactctgtgtgcctgggctgacgagatctgcgacggcttctttgacttgatcggtgggccctcggacaacgtcaactcctcacgagtgcacgtgtatgtgacgcagacccccgcgggtacttcggccaagaacatgggccactatgcgcaaggcatccgggacaacacgttcgcctcgtacgactacggctgcaactgcgaccccagcgcgggcatcgacgcgtgctcggagttcgactgcgtgaacaaggccaagtacggctccttcaacccgccagccttccccattcagaacatggtgtacccgcgcacgggcttctacaacggagctcgggacacgttggcgacgcaggccgacatcagcaagctgcgagctggtcttccccgcggcaccatcgtgttcgacaagacggtcgacttcggccacatcgacttcacgtgggcgtacaacgcgcacgagaacgtgtacaacgacctcatccagcagatccagcagtacgaaggcaagggctactgaacaggtcggtcggttgcgatggttgtcgagtttagcgtgtgtgttgatagccgtgtgttagtgtcgtttactacccgccaaacatgtctgcatacagcactttcagttgttagtatattcagattttgaaacatgcccgcggagaaagagtcatgcatttgatagcctagtgggatatcagggtgtcccgctcaggggttcataatatgaacttcatatcaaggctgatacctgtaataaatatcgatactgtatggccggatacttgtatcagtatcacctgatattggtggtggtgctgtatcgagatccaatgatacttcggcatataaatatcgatatcctgcgacctagtgtagatttcaccaaccaggttatttccatgtgcgctaccgcacatagttacttgcatatagccacttctcccaacaagcccaagtctactactaccatctcggttcggttgcgtgcgcgctctctagagaatggccgacgaggatacgtcgcccagtggtcgtggccgtagagacaaagaaggcgaagttggagtcgagttggtattccactatctgtgcgtcactcaaaccagaacatgtttgttcttgtctgggagttcatccacgtacttgctactccgattcctgacacaaagaagaaaagcagctcgttcacccacatctgtctcgtgtgcgcagcacacaaaaaacacggacccgacctcttctggacggagatcatgcttaatgcggcaacagacgactgctaaccccaggaagcacatgttcagagctcacaatgatcatcccttttcggttgaaaataagcttgagaatctgtctcgccaaaccactgtctaccgtgtgtcaagagcgatgtttcagtcttagtggctatgtggagaacgagttgcgaacccagcttgataacgaccgggcggagacgatgtgcttgatgaaggctaattggtccgagtacaaggaagtgctgcaatagaataggagacggcgacattagccaaattactgcagataccattttcatcaatatatgtatcatttatcctggtcgggttggggtgacgccctcccgggaagcctgggcaagcatgctgctcgtccaacgcttccgacagacgcttcacggtgtctgtcagtctttgacgggtctctccctctccacatctctctctaaccacccctctcacccccagctcccagtaacgcagccacgactccgcccgcggaagcccgctcgccatttccggctaggtacgttaaacgtgcaatccattggctcccagcgcaagcaacatgagacgctccttcgagacccgtcggcctaccgcgccgacgtattaggcctccaagaaacccgcatagcctatcaaagtgagcagaaggccggtaagtaccatctcctgactctaccgacatccaaccgatggcatggcattggttttgctattgcacctcacctgcgtaagttcctgtataagtactgggcccattcggaccgtgttggagtcctccaactatgcatgcccaaggcccagcgagtgaacatcatcaatgtgtactcaccgcacctctatcgaggtcgaccgtttctacgaggatcttcatgcaatgctaaccaaactcccacagcgtgatacgacattataatgggcgacttcaacgcaaaaattggacagcaacgcgaacacgaacccttcttaggacaatggggacgtggccgacgcaccgcaacggccacgtactcgcctccttttgtgacgctaatgacttgtttatttctaacactgctttccgaaagcgcgcttgcaacatcacgacgtgaacgctccgactcaaggatcacagcatcttcaaccaaatcgactacatcatttgcagccagcggaataaatccctgtgtgtcaacgcacagtcgtggggcggtatcctcacaccgaccgaccacaagctggtcacgctggactttgatctccatatttggtgggctccggcgtcgagttgccagagtccacttcaacaacgccgagactcgcctcgccacgcacctcctagtgcacgaccaacgctcccgactacaataccgccagctactatccgctaagatcaccgccatgccacaccaggggggttcgccaaatcagcgctgggcgacgacgctgaacacagcactggaatcagcagcagactcgattggataccttccactcgccaaaagcgccaaaatgccggatccagaactagcacgtctctcctgcaaacaacgacgactccgtctagccatctaaaacgaccgtgcgctggacgtcgatgacctccgccgccgacacaaccacgtacttcacaaaatcagggagcgcagcagacaccttgctcgcacttttattgacgagaaactaaccgccataaaccgctctagccattcggctaggatgttcgaggcaacgcgagtgctgcttcgacagcgctcaccagtaacgtctctatgtgactccacaggtaaatacattctccaccgcaaaacagcaggcgccaagatcagacaacacttcaaggaacagttttacgacccgagccgacagcccgtccccagcgacagcgtggctcgccctctggagaggcccattacagccgacgagctcgcacgcgccttccatcgccttcgcaatggccgcgcaaccggacctgacgccatcccagctgagctactcaagtacggatctacgacactagctcaacctctcgctgtcatactcaacgacgggttctctactggagcaaacactcatctgggcgacggaattctccttggacttccaaagccaaacaagccggctggtcaatgtgccagccttcgaccaattgtgctgctcaacagcattcgcaaggccatctcgcttgtcgttctcgagcgcatctccccgaaggtcgaacgctttctgtcccctcaccagagcgggttccgacccagtcgcagtactgccgatgcagtatgggcccacaggtggatagcagctcgggcgcagagattcaaggaacggttccgcatactggggatcgatctctcccgtgcttttgaaacaatcaaccgcgacaagctccttctggttctcgagtcgattgtcagcagcgatgagcttcgcctgatccgactactcctacaagacaccaagctcgccctccgattcggcaacgacttgctctttccgtttgagagcaacacaggtaccccccaaggtgactcactctcccctgttctttttgttgtttacctcgaagcagccttacgcgatcttgccggtcaacttgacgtcccccacgacctcctcgcggacatgattgtatacgccgacgacgctgacttcatttgcagacacggagatatcactaccctgatcgagactcaagcacaagccatactggccaagtggtcactcaagatgaacgcttccaaaacggaacacacaattgttcaccgcagcccgacagcccacaccacccggatcgctcgtgccaaggatgaagcctggcgcaacactcgcaagctcggctctctcctcggcgacaccgaagatcgatcgcgccgtaataacctagccaccgcagcgctccaccggatgtggaagatctggcttcggccgtcaaagacatcgcaagcgactcgagtccgcctctacatcagctacgtattgcccatcctgctttacaactgcgggacattggcgttaacccacactgacctccttggcctcgaaagttttcaccgccaacaactccgcaaagtcatcggcgcggtctaccctcgaaggatttccaacaccaagctatacgaccttaccgggacggaaccgctacgctatcacctcctgcgcagccgatggcgattgtttggccatatccttcgccggcccgcagctatccctgcataccgctacatggacgcttacttcaggccgagcgagtcaagcaaatggagaggcagacaacggctcacgcttccgatggtcctcgacgccgacctccagactctttcttccgggcaccgtcttcgtcgttctcccgatctttacctccttcgcctttgcgcgcaggatcgaaaaagctggaagcacctgacggaggccctacttgcgtacgtgccgattgacgggctctggtcgagagcagagagagaattagagagatgagagataactcgacgcatgcggaagttgacccaccaaggtggtaagacggctcgcgtaacgcgttcacaatacaatacaatatatgtatcattatattgatatgatattgatattagtatcagtatcgctgatatcaccttcgtcagaaggccgagatacccgataccagctaaactcgcgctggtatgaacccctggtcccgctccaacgaaagtagtcattagcagaactaacgttagatcgtgttgagttgctggtctttttgatcagctagcttgttaggatttttttaagttattcaaactaccgcatcatcaccgcaagataaggactaagcgagcgcagcaagtcgaaccccgcgcgttagcgcagtagggtttaatgatttctagtagggttatgcggatcatggagcgccggcagggccatagtttactgttgttacgattgcttccgctgtaagcacccacctgcggatcgtttaaagaggcatggcgtattcacacgagtactggcaagggtaacgttcaagcgagccgccaatccgctcgtcaccagtattaggtagagatccctgccttgccggaggggaaagttcggatagaagctggcgcacgaattcgtcgaatacggggcttctacaccagggacaacgcgatacacaacactgtcatcgccaacgcagtacgccaaagcgttgtacacccttctcctatccagtatttttaatgctgtcaggggatcgctctcgtcatataggactcgaataacccatccgttcacgtaaggaaacacaacacacaacagagtagtttatcaaactcttaggcacattcacgctatgtgtgctgatgcaagtgtcccccttcgcagactgtagcaacacgtcaacgatgtctgcatccacggtaaattccataggaaagcatcgaggggttgtgcgcgacctgaacaatgaccacaccaaacactgtttaccacccaccgtacggtaccagtagatcttaccagaggcacgttcgaaccagataagatcgagtgatgtctggagcacatgagagccctgggcgtgggctgggataggcccgaaagtgcaaatagggtacggactctcctctattacctatatatgcagtactgcaaggactatgacgatgacgtttaccacccttatcacgcatcgaagcacatgtctgcgatcctgttctgcgttgcgttgccccacgaatgctctcggggcgctcggacgtaagaattcccgtttcgacggctggtcgaatccacagcagggagccgagagctcattcaataacttccactcgttcactcgagtccccccaccgttcccgttcggctttgtctgtgtctgtccgttcccttcctgtcgtggaagcccaacgcttttcggtggacaccctcttcaacctgcaacaatgctctcctgcaagaccttcctgaagctctttgccgtggctgtggccctctccgacttcactgcggatgccggccatgtttccgactgtgagatgatctacgacccggtctacgacccggtcacaccggcgcccaccgtcccagtttccctgaacgaccagcttccggtcgagcccacgctggacacgcaggacatgtcactgaccgatgtcgagagcgattcggctattcaacaagatgcgttcattccttccagcagcgggtacggagacgtccctgccccggcggatggcatcacacaagacaccactagcgtcgatgttcctgttgacaacatccctgccccggctgatggaatcagcggaggatccactggtgtcgatgttcccgccgacaacgtgcctccagccgacggcattagcggagacatcactggtgtcgatattcctgccgacaatgtgcccgcccctgccgacggtatcagcgcaacaccagcccccaccactaccgacagtgatgtcgacatttatgccccggcggtcggcgtcactcaaggttccgatgtcgatgcctctggcagctcggacgacgaagctcaaactccgtactcgtccggcacggatagcaccagcggatccgctgatgtcgatgcacctggtgtagcgacgctcctgaacagaccgacagcgccagcgggtctaaagttgacgccgacagcagctgtgtacggagctaaagccccgtacccctccaccactggcagtggcagcgatgacgacaacgtcgacaacagcgactcggctagtgccgaaggtggcgacgacaacactgttcctgctaccaaaggcggtaaaagcggcgtccaaggaagcggaggtaactcgcccagcggtgacattaaatcccttggtggtgaagtcgatggtggtgccaaggctgacggctttgcgaacgaagaagctaagggcggaattgctactgacgccgtcactgtcaccaacaacggcgccaaggtcgacggcagcattactagcagtgccaaggatgacggcgatttaaacagcggagctggcgttgacggccacgcgaagggcggcttcaacgctggtttgaacattggtcttggacgacttggtggtgtgtcgctcggcgttggtgttaacggcggcgtcggccacggtacgggtggcaacggcggactgtctgcaggcgtgggcctcgatgtcaacgtcggtggggatcatgcgggctttaacgctggtgctggtctcaatgctggagctggacttggagccaacgcagggctcaatgccggtgccggtctgaatgccggcgctgggctaaacgctagagccggcctcggcgcaaatgcgggacttcacgccggagctgggcttggagctaatgccggcgtaaacgcaggggctgggctaaacgctggagctggcctcggtgtgaacgcaggcctcaatgccggtgccggacttcacggtggagttggtcttggcgcgaacgcaggcctcaatgccggtgctggcctcattgctggagctggcctgaacgccggggcaggcctaggcgcccacgcaggcctggacgccggagctggcctgaacgccggcgctgggcttaacgctggtgcaggtctaaacgccggcgctgggcttcacgctggagctggccttggtgccaacgcaggattgaacgctggcgcaggcctaggcgccaacgcgggcttgaatgctggagctggtcttcacgctggagctgggcttggagccaacgcaggtttgaacgcgggtgctggccttggtgcaaacgcaggcctgaatgctggagctggtctccacgcgggtgcggggctcaatgccggtgctgggttgaacgctggtgctagccttggagctaacgcaggcctaaacgctggagctgggctcaatggcggtgccggcgttggagcgagcgcgggtgccggtgtcggtgcgaacgctgctgctgatcacggtacgaatggtgccgtgtctgcgagcgcccacgctggccgccgtcttcgaagcatctagaggctggaaggccaggtgccgtggtcgcgttatctgtttcaatgcattggatactgtacaacctcccttaacgtattccttgcttagctgcacggagctggtttgttgcgcttgaaaacgaaaacgagagcagcaaatgctgtcaactcgacggaagtctaatgacacaaatgatcatgcggactttccgggctgcagttccaggtaatattgatgctaacgccctggtggggatctgcgttgataagaacacctccatgactaacctgtaaatacatagtatccctgtggtttgatctggaggcatgctcctccagtggaggagcatgccatgtatggataagcttacatgattcatttcacttcatgtaacatgaagtgccatgataggaagagctcaacatgtactgtattaatattattggtaatactgtacattcgacactttgccaaattttctcctttgctcgtaactcaaattttcggcttttgactcaaatttgaattcacgattttttggcctcgagcacgatggaggagttcgaccgcgaggcgccgctgttcgaccggcgcttccacgtgctggtgcagtacccgggccgcgacgagaagctgctgccgctcaccatccgcctgctcacgggcgtgcgggtgcgtcctccctcccccttcagcgatacaaaactattctcaactcaattgaatctggattgttattttttcataatttcttcttgtgtagcaaaataatgccaagaaccagaaggagcgcgtgatgcgcgtggagatcacggacgacgacggcgcggatccgtacttcctgtacctctggagcgtctcggaggaggagttccacgagctcaagacgcagcagaggctgctcgtggactttgccacgttccctgccaacctcatcgagctgctgcaatgctgcgtcaaggacagcaagaaaattgcacaggaagaagaagagaaggagggagaggctgaagtttcggccgagggggacgcgccggtggtgaacaaagtggcaaatgagaccactcaaggcagtcagaagaccagatctgcgggaccagtgccgttgaggtatgcggaggtggtgcatcgatttcttttagtgatttcggttgactgatgatgttttattttgtgcgcgcatattttatagttatttggcggtgttgaacacgtcggatagcaacggacagtcggtgtttagcatcgtggagacgaacccgttcaagcagttgacgcatttgtcgctgagattcgttccgggtgatgacgcggtgattaaggcgtatttggcggcgagattggcccaggtgggagcgagtaggcggatgctgtcgaactcgttgaagcagacgagcgaggaactgcagaccacgcagaggagtgaagcgacgttgcagcagcaactatcggcgttgggatatgaagcggagtccacactttctcaagagaaaatgaagtttgcggatgagttggatgcccaacgtaagaatgcagcggctgcactgaaagcgcgtgaggacgaactcaatgccaagatcgatgtgctggtggaaagatacgagaaagaggtgcggttgtttgtcgtggcggagttttcctttcatgctaacgtaccaagtttggtttgaaacgcttagattcgagagctgaaggcgaccgccgagacgagtgaagcgcaagtgcaggagctaagcaagcagaaataccagcatgaaatgcagatcgatcacctgcgcgcgcagtcacaggatctcactcaaggcagaagcgcgcttaccagcgaagtggatgagttgcgtactggaaacaaagagctggaccagaaggtattccagcaggagaagcagatcaatgccttacaggttcgggcagacgcgctgcaacagcaactggcggacaaggaggacatgatcaagaagaccacggaaatgctacagtcggcaaaacttcacaacgacgaagttgacgagtcgctgaaaatgtaccgagataatcacgcgcggttgcagcagaagctggaattgagcatctcggagatcaataaggtgagcaggcatggccttatttatttgactggtggcttgatgagctaggtatagtcaaattctcatgcggtgactgttgcacagggaaatgaaattatcgagcgcatacaaaacgaaaatcgtacgctgaagtccaagatgaggatgaaggccaagattatcaaacagcaggagcaggtgcgatggcttagtgctgcatgtagtcctttgataaagtccgtgctctcactatcgtatgtgaatttacagtttgtcgaggaaaaacaacttcagcgtgaggaagcgctattggagctgaagtcgacaaaggaagatgttcgcaagcgggacgagcacattttacagctcaaggttcgcaaagaaactcttggtactttttgcctttgagcagttatgacttactttattttttttattcaccgcaggacacgataaaggagctgagtcagaagctagaggacagtaacaagcttctggcctccaatcagcaaggtacgctccaattcttcaacttgtaccacgacatttgttgctgctgcgttctaatacgcgtgcctctccgtacagtgatcgcatggctgaacaaagagatcaacgaagcacagcttggccaccaacggaggtcgacagcacacccctctgtgctcgcgttccgtccgtctgataaggtaaagaaagcgcctgaaaaagcacagtggaagatggtcacgctaacctctgcctaacattgtctgtcttgtagaagaataccgcctcggagtccagggcaacgacacacttcgcttccacccttcagtcgtagcatagccactaacctccagtacccccgtactctatctactgcctccatcgatggcaacagatcagcaccagcacctcacaagagaagacctttccagcccctgccagtttaaatgaccagtcctccgtcgatgcggatgcattgtcctgtgatgtaggacgcctcgtcactcgccaggaacgctacgagctgcgcgacctcctccgccttcccgaagcgagccaacgggatgttgcccagcacgcgttcacgcgccgcgtcagccatggcgtccgtcatgtccgtggagatgaagcccggctccacgaggttgacgcggatgttgcggttgccgaactccttggccagcgacttggtgacacccgcgagccccgacttggaggcgctgtaggcgacctgccccacgttgccagccgcgcccaccacgctgccgatgttgacgatgctgccctggcgcctctgcagcatgcccttggccacggccttgcacatgtgcacaggccccacgaggttcgtgagcagcagctcgtccagctcggcgtccttcagtctcagcagcagactgtccttggagatgccggcggcgttgacgagcgcggagggccccgcgcccagccccttggccacttgagccaccaactgcgcggcttcagcgccggcgtctccttcgccacgccgcgggcagctgtaggccagcggcagcacgtcgggcgagatccgctgcgcggcctcctgcgcgcgcgtcaagtcgcgcgaggtgatggccacctgccagccgcgacgatggagctgccgcgccacggcgaagccgatgccgcggctgcctccggtcacgagcgccacacccgctggcatacttgtactgtcagctctcgtactttatcgggcccctgccagcataaacagggcggcaacattgaaccagatcatcaaaagtgcgtggattgacgtcaattgcgcgcgtcgagcagagcagagggctcgcctcagagagctcacttccggatcttccttccccctccaagcaccaagtagcaccagcagcccaaaatgccgaccctctacgtaggcacgtacacgcgcaaggagggccacgtggacggccacgccaagggcatcaacgcctactcgttcgacgacgcctcgggcgagctcaagctgctcaaggtgacggagggcgcgggcatcaacccgtcctacgtcttcggctcgggatcgacgctctacgccgtgaacgagagcaacgagccgtcgcagctccgccccggcgaggagacgggcttcgtgaccgcctacaagatgggcaaggacggcgagctgacgcagatcagccgccacgagaccggcggcgcgtacacgtgccacgtggcgctcagccccaacggagacttcgtgtctgtcgccaactacggcggcggcagcctctcgctctaccccgtgaacgcggacggctcgctggccccggcgtcggaccaccaccgcttccaaggcgcgagtctggtcaacccggaccgccaggaagcctcgcacatccacagcacggcctggacgcccacgggcctcgtggcggccgacctcggcacggaccgcgtggtgcagtacaagctggacgccgccaacaagaagctcgtggacgaggagttcatcacgagcgcgcctggctcgggcccgcgccacttcgcgctgtcccccgagctcggcgtcggctacgtcatcaatgagctggacaacacggtgagcgtgcacgcgctagacgccaagaccggtaagctgggctcggagtcgctgcagatcatctcgactatacccaaggactactcgggcccgaccgcgctggcgtccgacatccacatctcgacgaacggcaagttcgtgtacgcggccacgcgcttctgccacagcatcgccatctacaagatcctgccggacacgcgcctggagctcgtggagatcccccccacgcgcggcgagacgccccgcgacatcctcgtgtacaaggacttcgtgctggcggtcaaccaggacaccagcagcctcgacgtgttccgcgcggacggcgagaccggcaagctcacgtacaccggccactccatcgactgcccgtcgccgtcctccatgttcattgctcagtaaattgctgttaagcttaagagagagaaagaaagagacacatacgatgtctacatgttgtaggcatcgccacaaacgttaaccccgataaggttcaagacaaatgtactgactaaatctaacaagagttagtacaccaccaccgtgtccgctaatgatggccccctttgcttgtcaaaagggacttggcgcgttcaaagcagcgatggcgcagatggcggggcagctctgggaggcgcccgccatggagcgccgcgagttcgtctcgtgggacgacttcttcgcctacatgaaggagtaccagcagcgcacgcaccaggttcgcccccccccccccctccctctcgtcctttgggccaactaactcttgcgttcacgccagtccttcagcagacgcagcgccacgtccgtcaagacgcgcaaccaggtgctggcggccatggccaagtcaggccgccccatccccagcccccttctgccagagtcgttcctcgactacacgcgcatgctgcagtgctcgcacaagctccggggcaacgcggagcgcactcacgcccgctggaacggcgagcagccgtccgagtgccaggccagggtatggcacgaagagcttcagtgccgacggatagggaggcaaagcattattaacgtggtgttcctcgtcttgatgcattagattaacgcgacgctgcagctcggggactacggcaagtactacattcgtgcgacgaaggtcagcctcctgcacaaccacccggtggggggcgacgccaggccggtgtctgtagctgctgctcagacagccacttcttcagctgtggcgagtgggcaagaggacccgagtcttgccgccaagaggcggcgtgttgaaacccagcgcaagcctgacgagagacaggaaggcacttctagccacactgagcgacagacgacgaaggaagcgcagcagcgcgtacctacaatggcggacgtgcggatgttcctggagcgcgtggagatctcgcgctccaatcagcctggagcgggtcagtcagtcgaggaacgcctcgcagcttacgtgaacgagttcgccgcgcaggaaggcaacgcggccaagattttcgtggataacgaggttcgtctcatgtgtactagttctttggggacgtctagctaggtactgactgacatgctgtgcttttgatttgtgctatggctgtgggagtgtagaaggttttgtcaagtgttacgctccagacgaagcacatgcgccaggtatttgaagcttttcctgaagtgctgcgtgtcgatgccatgccaccgactacgggatcctctgagtcaagctaccgagttttctcgcttatggcgcacgatgtgcttggccagtggcagtatgtgcagcacgctatcgtggaaaatgaccgatccgagacgctccgagttgcacttgatcaattcaaggcgcacaaccctcggcacacccgtgttcgcgcgttgatcgtgccaagtggggactctaaccagctcaaggagctgcgcgcgagctttcctgctgcccgcgtgctgtactcccaattccacgtgctgcgcgcactccacaaggtaatagccgaacacggggacttgtcttcgtggcaccgagaccgcctcacaggaatcgcccagttgctcgtctacgcccccacgtcgctcgtgtatgcggctaatatcgctgtcatggtggatgttctggggtcgaagcaacactccttcttccgctactttctcgagaagtgggacgtgtgtcgtgaccgctggagtacgtttgctcgtgaaggcgtgaccactttcagcatgtctgaaaatgacggtccgtttgccccgacgtggaatgcaatttttgccgctgtcaacgatgaaatggcgctcgacgagacagtggctgggatccggtactatcagactgtggtggagcgcgcgttcgttcgtgagctcaacttccaagtgaacaattcaggcgttaactcccgtgttgcaggcagcaatagcggcgaggactacgatgctgagatgcggctgttggcagccacggtaggcccagcagcgagcagcttgatcttcccgcagtaccgctacgccgtaacgcgaggagcgtaccagttctgcgagccaagtcgtgggagcttcttcatcagcacggtgtctccaaacgatattttctgcgacgagccgtccaaagagttttgcgtggaggttgatcgtggctggcagtgctcgtgcgcgtttatggtgaaccaccatttgccgtgtcgccacgtcttttacatccgccgtatcgtgcgctgcagcaccgtcatcccgctggagaatcttgagcctcgctgggtgctagcgaaggcgaggggcttcttcaactcgtcacaaattagtgaatccgcaggcgatgcactgacggggccagatactgagcgtggcaacgcgacagtgccgccaccaggagcctggcagaagttcgtgactgctcaagaagtggggaagcgcattggctatcggatgatggagatggaaccggaggagttcgaccgagcgctgcgattttacaagctcgtggagaccactatgcgtgtgcgtccattcgacttgaacgcgggcattgctgcccggatcaacagccaaaacggtggccttgcacgtgcagcagcgcacaagcccaactgggtcgagccggatcctacaaggacgttggcaccacgcagtgttcccccaggagtggcaggcaccgtgtacgtgtcgtccaatgaccgcatggccgcggcagtcgcagcaagaaacaggcagcaggctcagctggtgcagcgctatcgacggaccagtgcgataaccacaaaggaggtgatcgaccttcaagacgagtcggaggaagaagaaaagggcccagagaccaacgagtcagggcgacgagaggaggcagaacagtctgaaggtaaccaggacagcaacaacgaggagccgtctgaagcaggctccgttaccgaccggccctctgacaaccaagataccaccgagaaggccgccgtgcctgcgagcaatcaggacgaagacgaaggcgaagacgaagatgctcaaccggagcaagacccgtcgagcggcgacgaagcagttcacagcactccacgcatccgcgagccgtgggaagtgatcgacgagctcgagaaggaccaagacgaagaagaagaagacaacaacaacaaccgcctgatctagtatcccacctcgcccagtcacgtactgtaggtatgtagcccaaaacgtagatgtcatgttttccggccaaacggagcactgtagttgcagttgcagttttgacgcgatggctacactattgacacgcctgtcggtgtcccactctgtacactctgtactgcccatccctctcttaaatccggtggtgctagcctgggagcatttcagcgcggacctccctcgaccgcatacaagaccccacccatgtcggcccgccgcgccaccgcggggctcagcagcagcctgtacgacgacttcctggccgagcacacgcgcctgaaggagcccttggagccggccacgcactcgcgccatgcgctggagatcaacaccgtcacgcccagcggcatggccatcggcctgcagacgtgcgtgctcgcgtccttcttcaaggccgccgtcaagcgcagcgtcgagtcggcgctcgtgtgcgagagccagctcaactccgtcatcacgtccagcctgcgcgtgagctcgtcgcggcacctggcgctgcaggcgcatctgcaggccagccaggggctgcgcttcacgctcgaggcgcaggagtcggccacggagaaggcgccagcctcgttcgcgcgcatcggcgccgactacaaggcccagagcttcttcgcgggcgccaagatcgacgccgttaatgggcccacgctgcaggccacgctcggaggcaggctgggcgacgtcgcgctgggggtgatcggggcctacgacgtcggactcgaccacagcgacagactcgggaggttcaccacgctcaatgtggctaccagctactgccatgaagacctgctggctctgctgcaagtgtacgtggcagagtggaatggcctactgcgttatggggacatggtgcttactgttatgttacgtttgctgtaggaatgacggagggcggatggttcggctggacttgacgcagacggtgtcgccggagctgatggtgagctcgaggttcgtgttcgacaggaggaaggacaagcggtcgctgcgactgctgggcaagtacgcgctgagcgaggccgaggccgtgtcgagctccatcggctcggacggcatcttgatcggcgcgttcgagtggcgcacgtccaagcacttgaagacgcgcgcgtcggcgcagatggacttgcggcactacgacagcgactcgcaccacctcggcgtgtccatagagatcagctaagcccacgggctcacccacccgccacgactagtatatataaagagggtgcgcactcgtggaagactttaagacagaggctaacaacaataaaaccaacaaccgtcaacaagatccaacaatgccttggcttcgtgtttgctgccgactgctcctacttggcgtagatgacagtgtcgcgcttgctgcgcgcgatgatgttgcccttctcgtcacgagcgcccggagccgccttcgcagacggatggtttgcgagctcactcggcacgggcatctcagtcgacacgaggtactgcttgaggtcgtacatgatctcttcgtcgtcgtccgtgaggaacgagatagccacaccgtccttgccggcacggccggtacgaccgatacgatgcgtgtagttctggatcttggacggcaggtcgaagtttacgacgtgggtcacgtccgggatatccagaccacgaccagccacgtccgtcgccaccagcatatcgcagtagccttcgcggaacatcttgaggctctcttcacgctggtcctgcgtcttgccaccgtgcaggattgtgcagcggaaaccttcgctcgaaatgaacttggccacagagtcacactccttcttgatgttgacgaacacgatgatcttggcgccatccacaaccttctccttacgggaccgcggcaacggaaccgactgcgcactgagaatgtcccggagcacctccaccagcttggagcgcttcttgcccgggttcatgaacaacacgcgctgatcgatacgcttgttcttgcccgagtcttcgtcaccaatcttcacgatggacgggtgccgcaggaacgtcttggccagccgctccacctccacgggcatcgtagcactgaacattgtagtgacgcggagtcgatgctgcagctcttcccctggttgagctccattagccaacgtgagctgttgctccatctcctcttcgttctctgacttcagcaacgatcccatgttctccaacacagccaccacctgcggctcgaaacccatatcaatcatgcgatcggcttcatccaacaccacgtagttgcactggtttaacaccaggtagtggctttccagacaatccatcagtcggccaggcgtaccgatgatgatatccacaccctcgcgcaaacggaatccctggtcctcgatgctctgaccaccaacgacagacagcgtcttgatgggccccagcttctcaggctgtcccacactcgtgtacttacaaagcttgatggcttcctgttcaatctgcagcgccaattcacgcgtcggtgccatgaccaaagcgagggggccttgctcaccagtacgcgcaaccatcgcaggtggcagcgagtagatgtacgcgataatagggatcacgaaggctgcagtcttacccgaaccagtctcggcaataccaatgatgtcacgcttctgcagaccaatggggatcgcctgcatctgaattggtgacggacgctcaaaacccagatccttgatggccttgaatacagcatccggcagcagattgccagcttcatcccacttgcgcagcggattcggtgcacgaccacccttaagcgtaatatcaaagtcctcgcggaagatacgccagtcacgctctttcatctcatccagcaacttctcggaccagtgcgttcccatcgtcttggcctcgcgcgaagccatctcttgcatgcggtcccgttcgcgagcctgcatgttgcgcagcgcgcgctcacgctcctgctttctagctgcaatctgttcactcgtcaaactgccgtccgtctcatccgcaagttgctgctccttctgccgcttgcggctgagctcctccaagaacgagttcttcttgcgctgctctcgcatatctacaccagctcggtatccgcgtccatacagcaagtttacgtccatgcgtttcgcgtacagcgggttcagatccgtgctcgtgtcctccgaggcctcccagtcgaactggaagatcttcgagaacttctcactcgccttcaccactttcttcttcttcaccgtcttgcccaagtactggtccttcagagcctgcagagccttggcttcgctcggatccaacagcgccggtttcccctcaaccttcgacgaagaagagtccgctgctccacgtcgagcgtctcctctgtctctggaatcagccacagctctgtcatcacgacgacggtctccgttagatctcgatcctcggcctcgctcccggtcccgttcactgcgctgacgctgcaggaattgacgtcgcgcgtcctccgcctccttccgctgcttgtccatctacaaaaataataaattataagtaaaaaataaacgatattagcacaatattctgtgcatttccacctcctgccgcttcttctccagcctctcgagcgcgtccttctggcgctgcgccttggatcggaacttgggcatggctggggcctcctcggtagctgcgggggcctctccgatcttcagcggcagcttgcggtcgcctgcagccgccgcatttttggtctcgggggtcttggcgtcggcctcctgcttctccttcgccttacgctcggccgcgcgctcctccgcgcgacgggcgatggcggccacacgctcggcctctttacgctgctcctcgtccagcccgacggccgggcgcttgctcgcggagcgcgagcgagaccgagagcgccgtcgcttccgttggtcggtcatttcgttttgcaaacgaatatttcggttatgaaaagcattttcagatattgctctttttcaactgcaacttttccagttcacaaagagcaaggaagatcaaaagaaaagtgcactgatcctgtgaaggctgggatacagtatgagagttttcgtgtaaactccctttcaatttcccctccactaactacgggcaccccctgcgcctgcgaagcaaccccagtgagaattgtttgcaacatgtaggaaataaaaaagcttaactttgcggtagggctatcgtacagtagcattgtgcttttcagttgttttggcaaatcggacgtgtaaaacagctacctactgagatggggctaagttattggagcagattagcaggtccctcgttgggaattaggaccaggaattgctagtacgatggaagcacttgcgtaggtcctacaaacagccgaaagcccgaatgtcgcccattttcacggcattcggggtttcaggtcttacgaaggactcctgccaagtcctctgtcaggacttccgtacgagctgactctaatacggcgtatgccagacgcagaataaacctaggtaagcgcgatgcggtcgatacattaaacaacgaagtcttcgccctttgccttcgcggaccccagcactgattgcttctccaaacaaagcttgcttactccaaccggagtccattgaacggagagcccccgggagaccgctcatcggactgtccgagatttgcatctcagatttagagacccccaacctcagattaactgacctccaaagttcaacgtaggactcggcaaaatgaccgaaatacacaatagtaatacgctttggggaactagctattaggcacgtagtagataggtcgtcagtttcgaagtgagggggacttcagtggccatgccacgcgtcctcctcccctctttacatccctcggcaaatatatagtgcgcaccacattagtaaatgtgcggtacttttcctattggataatataaagagatatttcacccagtaaaatccatcttaacactccactaaaagttgaagtacattctatctcatatcatatctaatgagggccgttcttaacaagggagaatcgatagtatttagtatttcctccggtcggaaaacagtgaaggataaattttctcgccgccgtaacttttttctagatatgcgattggaccgcgaatttttgcattcgatgcggaacggtttgggattagctctcgtctttgatcacttaaaaagcgtaaaaacaactgagttatgatgaaaaagagtaaacgctaagcttcattttcgtacttaatcgtggattttagcctccgcaaatcccaggtggggatcctggtgctggcacaagccgctgtggcttttgaagcaatactcacctggtatagaagatattactgtacagcagcacttgctagacctaaggcttttatttgagggcgggggcgattcatacgcttgaagattgacagtttggctgaaatcgactccaaaatggcgaagctgtgccggcgtatgaagatggcctatttcttgtaaaatttaaactttctctataaattctgcacccttttaaacccggaggaagtagtagcgtacaccttttgcggatttggagtgcgtaatcagttttgcacagagaccactgaggtgcaagtttactttcatggatttcgtgctattttaatttattcgtgtaattacctgttttacgggtgatctctcacctttttttcgcggcttaggacaaaaaccactccataaacgatgtctatgtgctaaatagtagcacagcgatcgtctaatctgatggaaccaaatacgcccccgttctccttcgttcccagcactttagaggaatatacaccttttccgtctacaacacccctactcgctttgtagtacgctactaccgattctcccttgttaaaaagggccctgaggaccgttcttagcacacacggtgttcctatccagtcttatgacggctgttaacacgtcccttgtttaccctctgattacagacaacgacttacaaagccggcagactcaaaaagccggcattagtagaaaaaagacagacatatgttcacataattattttgtgttaaagcaaatcaaaacgcagaactatgcttttattttagcaaatcatagcttagataaaatcggttggccactgtaaaacgcgccacctcgcccactaaagcctaggttcattgtcgaaatggcgccgaaacaacagcgctgtagtatcaaggagaagcgtgaaggtgcgcagctcgcaattcaagtcggcgtcgacgaggctgcgtaccagctcgggcgaccccgcggaactgtgttcggatggtggaagcaagccgacaggcttttcgctttccgcggaaactcgcgttcgccaactctgaaggggcagggacgcaaggaaatatttcctagcgtcccagcccttgttacatttatgaagggcacgcgcacagacgaaaaggtcggtttaccattctagtacgtgcttttgcgacttaatactgactattgtgcgtgcttttatttttgtaggccctatcgacgcatgcaatgatcgactacatgtggctactagagcctgagtggtgtgcaagctacatggacagccacaaaagccctgagcagtcgctagaaaaaatgtgtcaacgcatttgcaaacggtaaattgtttctcatggtgtgaagttaaattttaatcgattaatcattctttcaattgatgtttttttttatttagttatgacttcacgtctcaaaagccccaagaagccaagcttccgacagtggagctgctcgagaaacgcgctgagttctccattgaactttggaacaagtactcgacgtggtgccctacgacaggatgaaacggctatcaattttgatatgccgccgacacgtttttgggctgtcaaaggccgcaaggaccctgcccgaattaccaagatgacgaagcacactggccgaatgatagcagttcttactgttcgcggtgatggtacgttttttcttgctttaacaattctgaaactgggtattttaatgctaacacattttgtattatatattttagggcataagctgccaattcccttcatcatccggggtaagctcggcggcgacatcgacagcgacgagctgccacactatccacccggtcactactacactgtccaggagcatgcctggatggacgcggaaggatggagattttatgtgagtaatgtgttaaaacatgaaatcgatggacccgctgtcctcctccttgataattttgactcacatgtttcggaggagggacagcaggtcgttaacgaagaaacgaacgctgcagtggtgcctttcccgcctaatacgacggcggtttgtcaaccgctcgacgttggggtgttgcaggaggcactgcaaaggagaagcgcctccgtgcaattaagtctacaattgcggcctgggaagaattagcggaaaccaccgtaattcgtagctttgaaaaagcaattcctaagtatcctgagatgttgatctgataatagcatcttcttttttcaaaacacatggatattttctgggttttgtacagttgatttttttttcgtccaaccaaaactctgccgggttttaatgtcagcggaaacttaatataggaggatactattcagcgtgccggctttgtaagtcgttgtctgtactttctccacttgatttgtttaacgtgtgcttgcacgccgagttgactgcctcactggttgcagctctcaatttttcttaggacggctggtaactgcattcattcctctcataattttaggtaaagccagaaaacatatttttacctttaacgacctttcactacatgacaaaatttagcataacatttgattattattacagccgagaacatactctaaaccaaaaattgccgtccagtaagcatcgtttcatatgacttctggcatgtcttataacttctgcctctaaattaattcttatcaaggctgtcattagctgcacctccaccttttgcaggccattttcttctgcactttcaattttgctttaagcttcatcggtccgacgttgcgcctatggccgcacttaaacctccggaggctaggacagacgcagttacaacgcccagacttcggtctgcggtaccaccactccattgtttggggagcgctagagcaaagttctcatttagcatgattgacgacctagtccttcccttttcagatgcggtcaaagttggctcgtgctgcgtttgcatcatgttaccgtgatgtgtcgtagtctttaaccattgagcctaagcatattggaagccctaatagtatgataacgttgcgtcttattgtcttgtcttaaccgcataagtctttacccttaaccttggcccaaaaataccttttcacttcaacctgaagccgcatggtggatcttgacctcatgaagtaccttcaatgcgtactagcgaaagcacacacgctcataaaccggatggtttctcataaccaaacgataaagtatccgtggcttcatgcaaccatgctttgttactgtggtaagggaagacttaggtctttgacccccatcaatctcctcaacttttcggtggcagtgcctttgtgagggcatccgcaaccatatcattattactacagtacgaaactactattcgtcttttgtcatgtacctctcttgcataaagccctttaatatcagtgtgctttgttggagcataattagctggatcctttattatagtaatggctcctttattatcacaccagcatactatcggttgcttctgcttaaagcccagcccctccaatagaaaccacaaccattcgctctctttgactccctctgtgctatgtggagacttacagtatcttgcctcgaactgtttcaagtaatacacacatctgccataatactgacatacccagtagctgactttcggttctcatttgcattcgcgcagctcgggtctgtgtatatctcgtatattacttccttaaactttccatcgaatacaagcccatacttcgacgttcctttcagatattttagtactctctgggctgccctgtaatggctcttattatagcatgagaggaacttacttagctctatgacagcatttgctatatcaggtatgttccacgaacaagatacatcaaagaccccactaaacctctgtaatcgaatggcggagctgctatttgctcaggactcatattcttccttttctagtactacacttttggcctgaggtgttggctctgggacacacttagtcatatcaaacttttgtagtaagttcatgatatacttatgttgggacatactaaggatctggttagccctgtctcgcttaacttccattttgaggatgcagtgaacctcgcctaagtcctacatagtaaactgtgacgcaagttttgccttaactttttccatgagtatcataatactcgcggcaatagtaatgccgtccacgtacacaccgattagtactatgtgcgactctccatttacctcccacttttgccggtacaaacagaactcctttttgcaccgggaaaaccctagttgcgccaagaacttgttgatgagcgcataccaaattcgcggagcctgtttgagtccgtatagactcttctttagcttacacacggtcgagccatccccatgccgaaacccgtgagattgttgcatataaatatcctcaaacaacgttccgttgaggaacgctgtggccacatccatttggtgaacatgtaaatcgttaatagttgttatagcgagtagcaagcgcaacgactcatacctcgcgaccgcggaaaaatctcattgtagtctataccgtgaatttgtgtatttcctcttactaccagtcgggccttaaacctgtcgacagccccatcagcgttgtattttatgtcaaatacctagtgacatcctaacaatttccgccctttgggtaattttacaagttcccatgtaccattctcgactagtgctcggtactcaactaggagggcggcctcccactgttcagcatgtggccctcgtttagcctctttgattgaccttggaataggtatcacctttatgtttcttgtgactttgttgatggccacaacatagtttcttaatcgagtatttggtcttcgtttgcggcgaggccttggaatggggtggggtattacctcactatcaccctgggctcccactattgtactggtcataatagttgaagccggagttcggagtcatttttctcccagaagatggtaactttccatatacgatagttagatataaggggtaattttcgccgtagattccgattctggtgtcagattcgacttgttcacattcgccctgagattgccaacttcccttttgtaacataccgtcgtgtttgcatcggatttgtatttgatttgacaagcatggatagcatcttttatcttgctgtgttgcggtagtcgctattccgggagaaaatacaagtttaaacaggtaattgatatgtaccgttaagtatccgaaggatgcctcggcgacgacttcgaggaagtttgctggacttggtacgcgctcctgacgcgaaacgccctgctcacatcgggcccaatacacttaactaccacttcgcgcgcttaccgcatcgtctcaggctttcctttcattgttaggttcgaagattcattcatagtgattacggcaactccctcatcgtcatttactttcaggccaacatccattcgttaggccctggtgccttgcgctacactcttgttgtgcgtagttgagataattgctcttcttttgagggtcttttgaggtccctgggcctaaaaatagataagctatcggtgcgagcgtccgcgtgttataatctccggcttcaactatattggccagtacaatactcctgtactcattggagttgctgttgagggctcctcagtccgtctctgtttagccggcgcattagtagtagagtctcgcgctcgcttacctaacccacatatctccttgattgtgtcctcacttacttcaatcttggccgatggaaaagaccggacaattaagctggccgtggaagttacgtcaaacttcacgtcccgggctaatcgatactctttgtaattttcggaaagccccaaaagtttgcactcagagcgcgatcactgaacttcttgtttgcccgtttggactttggtatgtgcgcacagcacttacttccccctatcgttagtgctaacccatttggttctgtcccgtataaggcctcatatggtgtatttcccttcagtcgtgcagcaggcactctgttagccaccgcagccatatacattaaagcttctggccaccacttcgcagccatatcagatccagccagagcacaccggacatggtccacaattgtttgctgtgcccgttcagctgacccattctcttcttgtgagtctacattcgatctttggaataagagacctcgcttagcgcagtacctgttgaccacaaaatttacaaactcggtacctccatcagttcggatctttttgactttgtatggaaatagcctttcaagttgtgtaataggattagctaacttgcttcccacctcctcgagtgatttcagcacaaactaccacttataagcggtagcatcgtccaccactgataatgcgtactgaaaccctgccgtaccatataacccctcatgtttcattttttccagtgagtcgagatgaagtttgtggagaggcagggttgcctttgtgcctatcatattctggtaagacattctccttgattttgctaaagcgcatgtacgacaaataaagttaacttttgtcatatccttccttgccaggcgcagtgccccatcgattatctcaccggacataatatctgtcagtcggtctttcccacatgtcccaaacgcaagtaccattttttcattgcattaacaccggattactatttttgaccgctagtactttcatagtatcacgaagtcgccaacttgggagatagtacacctcatcgattgctacagcagcaaacacgaatcgattattactatccaggaagtacaggtattcgcccgtcttcgcctgaatatgccggtatccttgtgtagcaaggtagtatgcactcagcaagttactaccacactctttatcaaaggcaacattctttattgagacacaaccgtaggtaccctgaggcttgagtatgttgaatctcactgttcattgaagtgcactctttgaggtactccggttcccttactcgaacgtttgaggtttaccttttcctaggtggctggaccaccgcctgtcagaacttatagcggctcctacccctgtgtcaactacccacaggtcgtcagttacctcctattgctttagcatggaaaataccccccaaagcgctctcgtacctcattgtcgatgtccatttgggtgaatggcttctcctcctcatcgccatcactcacgggaagcggctccttgaacgcacactggtccgtctcctcaattgccttcttcagcttgtcttcgtactcattggactcagtttgagtcatttcctcgtccccagctgcctccggcttcttcgcagcctttcctttcttgaccgccatcactcgcttcttcttcgtgctcggcgccgtccggattttcgagcggaacagtggaccacccgctcgctctggatcgcgatctttggccacgacggggcactccttcttgcggtggccatcttcgaagcagtagtagcagcccgagcttcgagcctctgcttgatcatgcgtccttttcttcctggtgaacttctttgccacgttgagcaccactgagcaccgcttgttcgtgagatccatgatctccttcttcgactcatctccaaagataccccgaaggctaacttcaacgttctccaccgtaaactcctcctccgtcatggtgatgctgcttccccaaaacatacttgggagttgagccagcacctccatgcacagccagtgctcggtcaccatctccttgcccaccagcgtgctcatcttccggttgatctcgttacgcgccttcttcagcttagtgaagaagtctccgagattgtcccagttggaggcaagggatcggtcccattgtcgtcgcagcacgagtactccaccagcatccccaccccgatacttgacctcgagctccttctagatatcgcaagacctcatactagacaccgtgtcaggtagtccttggaggaacgtgttggtttgggatggattgaacaagttcaacacccgccatgagccctgtcccaatgctcgaaaccgtaacgcatctccttcgcctcttccttagttgtttcctcagtgatggaaaccaccggcttctctgggtgagcctctaggaagtccaccatcttcaccatggctggtcccacatccttatcgagcagagtttgctcatacgccgagtcaaccgtacctatgtaggttatgaacttatccctccacatcggataccccccttccgtccttcccatgaacttctccagcgcgagagttgagccacccttattttggcttgtgctcatcgtgcgtggaggtttcggtactatatctgaaatattagtcacttagggccgttcttaacagaggtagattggtagattttggttgtatccgtgcaacctcgtacaactttcgagcgtaatcgtccctgacgtagaaaggcgcaaggtatcacgaggttgcacgggaggtagcatatgaactttgtcaaagttgaaagagttcacggttgtacggaggggaaagtcgaaattttgcagttgaattccctcgttgcagatgcgagtacctccattcctcgagtctccgtcatccccccagtttgcattggtttccctgctcccctgctagtttggcctacatgccacttgccacccccgctgtagtagctgggggaggggacggccctgcccctgcattctccgtctcctctattagcagcgggccaagattgtctacggcatcttcatctccgacccagtctgtacgaaatgacaacgtacgggaggccagttctgaaacaagcgaagatgcgagtttcagcagctccacgcagttaacatgctcacttgccctcgcccaagatactgctactccgttgtctcttagcgaggttcaatgccctggtacgacggacgagatcgatgcgcatccggatacctcttcgcatgaagtggaccacgaaggaatctccgtcgagtcgggcgccatctctgagcaagtgcgcctgcaatatcgagttctagacgcaattggaagctcggatcaggaagacgaacaaggtcaagagccaggaaagactgctgaaggcacggagctgcgtttcaaggatttcgagtggttaacgaagacggtggagcgtgatgggaaacaggtagaagccccagtcatttcaacgataagaggggagccgcctacaaaaacgaaagtcattgctctgcgtaacttttgtattgcgagcggcattcgaggatacaagaacaaacttaaagctgtgcttttatccctgatcgctcaacggatgaagaacgacaagatctacgggcgtattttcgagaacaagatgcaacagcgccgcgagcccgagtcgaagcaagtgtagtgcccgttccgattggttaacattctgttttcctgtcgttttgcgcctcggtttgtcgccctttacgaccagcgtacgcgtgctgatctcgacgccgccgtatctgcggaggagcagttttgggaggacgttcctgctgcatttttggattgcacacccgaggaggagttcgataatttgattgcagcccaccctgcattggaccccacctgtatcaaccctgcaagcatcgtccagcactcgattaagcaactccgtcagatttggggatcgtcacacggagcttaccgccaagctcacatccgctttaccaggactggcacaaacgacaaggacttctacaagtactgcaacgggcgtttggatgcactttacattcatatgcacctgcagatcaagcgtgagctcgtcggtgctgtgaatcgtgacttgcccgaagacgttttctacgagagcaccgagacatcgcagcgtgaaacggggtcggacgcaaaccgcaggaagaaaaatgacgtagctgaagcgatccgggactttggaaatcaggaatggcgggtagcccttgcaatgcgcaagcaagaaacggaggaactcacaatgcgctttctggagaacaaggaatcgaaccgatcgaattacatgaagcgaagacttcaaaacgaagtgaagagcgcagcaacgaaatattatactttcctcggcgatcggatccggtctttaatcgtgctccaaggtcgtgagaccaatccaagagttcttcaagatcttgaagaggaaatcgcgattctgacggcaaagaggcagaaagtgaaggaggatctaatttgatgggaaaaccgaggatcccagagtgctattaccgcctctgttggttttggccaggttcgagcccggtttgcaaaacccacacatgccacgatcctgtcagcaaagaagcagaaattgtcagagggtttagtttagttcccgatcgagatcaatgtatcccgagtggatgtgcttttgctgtctgtatttttctagcgagttgtatcctcttgacttttacaatcttaccgacttgttagcgtgtgcagctccgttatattgctattcgccatgcctcacagctctaacagccaacgcaacaagagatccatcgacaggatgcgtcgcccagtaggttttctggcgtggttgacggccacgtgtgccgatagtcattaaaaatcacagtcgagtccgtacattttgagtgcaaaaggttgtgcgcgccaggcctccagttcaggctccattagaggttgtggcttgtttggggtttgcagtcgtcccaaagcaaaatgacgaagcgcttctattcgcgcgggtcacagcgactaaactatacatctcagggcgccagcatctgcaccttgcttcatgctgttgtcctggtcaaaaaacacttattgttgtagtagctgatggagcgatttataggcgcagtttgtcaccgtcgccgagcacctttcttgattgccgagagtgatacccagccaacacttggatcaacacaccggctggttatccgcgtacgttgagaacgcgcgattagagtagccacggcacctccccatcgccccatagacaataccagaggcagcagtagcagtacctgcaacatgttcgatgattcgtcaccgctcaagacggctgagtgtattacagcgccgtatgtgacgggcgtggtcgaactggtcgacatgcttgtctttttgtcgttgaagaaattcgaccacaattggtgcaccttgggcatacgagttgacccgccacgaccacctctcgggcacctggttcatgagcagcatgtccttgctcggcgctttctccacgagattcgtggccttgtggagtcgcctcaccgagcggcctagcgcgcgctcatgttggtcgagttgaagtccacgccgtcatgcagtgaatcgatctcgatgtacgcaaaagctgagcatgttgacttctatcaaagcagtgcgagttgttcggcagacgcgaagtctaatcaagatcccggttaccgtgtcgctgcgcgaatcgcacaaggtgacattgaaacactaaataaagaagcatgagaactccttgctggggaacttccgggtcaacgataccttcatactagtagtaccattttgtggattaaccgataaggtaccaacacgttagatatgggtgcctactcgttctctgaagtcctgcgaacgaggttgcggtgggatcggcttagagacgcgttctggatgaagcgtacaagtctgtcacgcacatcggatacaccagcagtgctaaaagcttgtgggtccaatggatcgctcggcaagtatgccagacggctctggtcaaaaacgcccgtgttctctcttgcctcagcaactgcgaattctactgggaggtcagcgcaaaagttatgcagtcgagccatagccatcagagctcgactaacattcttgggcttcagttgaagaggatagttgagacatctccacttgttgctgaaccttccaaacgtctactcgattttaatcctcagctgacttaagtaaaagtcgaacgtgtcgtgcgctctgttcagccgtcccgttcctccaaaagggcgtgagcatgtgctctgaaggcatatacgctccatcgccgataaaatatcggttattaccaagattgcccacgtacgttgccagcttagttcttgcgaaagcccataaatcgctggatccaccaggtgcagcgacagcaaaatagatgaagcgacattggtgatcacatgcagcttggatattgagacccatgtgatgatagtgccccgaaaagtaagcgcgaacattaccacctgcttgcttccgcgttggtgtaataattcggacaagcatgccatcaacgcagccaacacagccgtccaaaacaccttctgagctcgattttgcgaactcggctgctgcgcactcaatctctcttggggttgtaggaagctgaatagccaactcggtgcagttgagaatagcaaagatgcccttgttcaaacagcgataaaaggaagccacacttagttgggctacatcgcgaatgtccagatacgaaccgccagcaaggtagcggagcgtgcagtgtaggacaacttcttcagatataggagcaactccagttcttctcgttgacatcacaccgtctacgctcaacgacggtctcagcatgtccaccaagcggttaaaatgggctccatccatgcgataagcccgatcaaaagtcttctctcgctgatgccgttgtacatgctcggaccatatcatgcgctggcgagcgtaaaaggtctcgcgagtgttcaactcagcagccgcagctgtgaagcatatgaatgcgccgtctagcatgaactcatcttcagagtcgctgtcatttcagccaaggagctcgccatcagaatcgtcgtcgctccatgcaaaggggtcgccgtctgagccgctgtcgctccagggaaggagattgtcagcaaatgggtcgccatccgagtcgctgtcgctccaggctaggagatcaccttccacagcccagtcaaagtcaaaccgcgtgcgctcgtccgagtcgtcatctagatcttgctccatggttcagagagagcgccagtccgggcgtgcaagggagcgagattctcgcttgaaggcaaatgtgaaatatgacattaaaaatcagatgaacgtatgcacttcattcttatcagagcgttgcatgttgcacggtgatacccgcacgtctctagcacacgtggaccttggttgtacggtgataccgatctacctctgttaagaacgccccttagtagataggccgtcagtttcgaagtgagggggacttcggtggtcattccatgcgtcctcctccactcatgacatccctcggcaaatatatagtgtgcgccacattagtaaatgtgcggtacttttcttattggataataaaaagagatatttcacccaccaaaatccatcttaacactagcgctctttacaaagaaataaaccagggttatcgtgaaattggtgatgttgctcgtcagcagcttggagctgtgtacgttcctggtatcgtaagatatttactagacgtgacaataggagaggtcaaaatttcattcctcctataatagactattattatttaataattctgttgagcaagacacaagtggaagggattttcaagaggcaaacgatagacgcctgcttcaggaggcagcggcgcgcagtcggctccgcaatgaaactacattgttacatgggactcccatcgagatttcaacagctgggtccgctccaggggccggaaaaataatatcaaagcaaaaaatatggtacctgtaaacaaatgacatgtatgctgagcatgtatgagtacaaaaacattgtgtggagaatgtgtacggtgaatgggggggttaagaacaatttcgcgagaatctgtagttcatcgccaaattttctttgctaaggcgccggccaactccctaggtgacctaataaatacttgtagtggacaataaaatgcatcctcggatccagtgtgacaccagtttcccactagcaggtcaattttatacacagttattagattatagagtcttctaagattattccaaccaataggcgtcgtgtatcgggacatctgggactcggtcattaattgacagtgtgtcgcactggaccgttttacttagggattttgtatagagtaggtgtatagagtaggtgcatgtatgctcagcatacatgttgattagttaagtgatttgtataggacatgccctatttatagcatacatgctcggcatatatgcgccaaagcccgtatgtatgctgagcatgtattggtgaatggggggggttaatcacacgagatacctatttatgcgtaaaacaccagattaatcggaaggatctatagtttttatcaacagaattcgcttttcgggaaacgcaaggtatcaacgggaatattgaatttatcttgaatgcatacacaattcagattccaagtgcactcatatctcttaggagtattgcgtcaacgagtcctcgctcgcttcttcttctccgcttagatcgctgagaaacgacgcttcttctgtgcgcggtacgtttgctgctgcatacgcctctttttcttgagcgccaaacctatttgagttagtcggtgttgcgactggcggaaccacatcccgttctggacgcagagaggattgatccagatgtgaaagttggctagagcgacctcatgcataagatggcatcgtacgagtctgcgttccagtggtacttgtcaatcgtgatttgccacagaacgtttgaacgcccttaacaattgtcaaccagaccgctatcgtttgacaactagtcgtccttctgctggccggtacgatttagagctgtgctttttttggggtggatgtagcggacgtagtcgaccaacctctgatagcccttgtctgccaatatcgcccatttagctgaatatatctctagcagagggtcgttgacctacaggctctcgccaatgggcaactcctgcctcttcgcaagtgaaagggctcgttggacttgaacaaggccacgttgtgcgttcctgattgatttagtcataacaatcgtgagatggtagtggctagcgaattttttttgattccccccctccccattcgccgtacacattcttcgcacaatgtttttggtactcatacatgctcaacatacaacatgtttgatagggattttgtagagtagatgcatgtatgatcagcatacatttaaattagataaatgattccaccttgacttccgaaccctaccacatctcacataaaagttgactactacacaagtcacggacggacagccaaagctcgttgaactcgcgcaacgagaagttcgtcatctccttgatgcgccgatgtcgtggaagcgatcgaagtgtggagagctaggggtcgcgttgcgcatggttctgctcgatttgagaatgtaattggcacgtttttcgtgtcctcccgccggctagtagcacaggtgacctgtatgcggcattgttatatgcgccgattggagcgctgaacgaaagatgaccgaagaagcggcagtcgcgagactttacaagctgataaagagtaaagtcagcatggataaagttaagtaagagccagcgctatctgtgcttgagggcggccgcggaaatacagagcattgatgccccacagaatggagacggacatggtcctctcacaaaagtaggatcatgcaagacctgaggaagttggtgatatagggtggtgtttcctttcagaacgaaatcggcaaccacctcgtatgagaggttctgcttatgagtttttgtggttagcggtacaaccgatttagcaagaatataatcgaatatatactctttaagccatgtcgatgaaggtagttcgtcgcagaaagctcttttgcttttttctttagacgcacgcaatatgtttcacaaaacaaatacgatcgaaattatgctattactgcaaaagcgttgatttgtgagagctacagcctcaaataaaaacgaggtttttcctgcttgcacggttgagattcgcattcagcaatttatttttgcccaatcaggacacagctcatatttatgctacttttaggatggcgttttaagaaaaagttatgcgtagagtttgctataatacatgtgaatcattctgaagtctcaccccctataatacaaattagatacaaaatttgttgtgtatttttttcctacgtgagtcagggcgaaggctaggcttgtattattggcttgcgtaacactgtgttgcgcggggtatgcccgtagcggctactgggcaacgcagtgtttgccgttcgtcatagggacgtcctggatgagcccagctacctcctctactaagagtttagtttgaccgagggctcgcggctttcgcggaaccactagcgcggaaggcgctggctccagatctcagagacctccgtttcgagatcttttaaatgcccccccccccccgccgcggtgtgatctcccctctctcacttggcccctggcgtgtgcattgttcgggaattgttggctagaattagcaatgagaaggatttggcgattagtcgatggtgacggaaattcataattttagccaataaaaacatgttgtgtaaaatacataaaaccttacgcgcatattatcgtggaccaatgaagtaggagctagtttgtctgagcggttctggtgctggttaggttctccttgcgcgaccaactttaacctagtcttcgattggccatacatagaggtttatgtttattgctaaaaaaaacgagaaccacatcgagcatgtggttctcagtttctccggtgcattttgcgaccaaaaggtttgacaatgccaccaccaaccgctttgatgtgcttaatcatgcagacatgtacgcgctagcctgtgggtttctgatgcgccgtgatgtacgtaacaatgtgtacattctaaaacatttgatgtactttgaaccgatgcgtggggatgtcgccacttacgccgatcgcaaaccagttgtgtgctgctgtggtttgagatgctgcatgttcactttgttgctgtattctacaaaacgtacagctttgggggaggggacgggggggggtatcctgtggtagcgctatggatggcacccgcatcgccattaagcgttctatcggctttaatggatggtataaccgctaacatcagggttaacatcttcgctacaggctccagcttccacttcggtgtcagcaagcgtctatccgttcatttcataagagcaatacaccaattgcaaatataattacaatcaattacatcaatgcgcaatttacctcgaccagtactctatcagtagcataagctcatttacctcgaacactggggtctcttcgttgccggtagcacgcatgtccgagttgtactcggcccacttgcgcttaagtcacttgatctacagaacacaaccgagtttgttaaaattgtttcactgtttctggcacgcagtagtttgtgaaatgaggttaccttttgctttcacttgcgagtttaccttgttcttgcactgctgcatgtagatggtttcactgtgaagacggctcatctccagcgttgccaaaactccacattacggcgctgtggtgaatgggtaattattttattacgggtgggctggtaaaatgggtggtgttcaatttgaagtaaaaaaatggatggttcatgtcgccctacttgctactgtgaccgttgccagcgttgccaacaggtttgtattcatgttaaacgcggacaccatttgaagctacgctctggcttttgcgatctataccccaaccaccaagtcccgaccgctgttctgacctcattggcccctgatacccctgtcgtcactgctgctacccctacaactggagccaccggcactgccgttcctactggcacattaagcgccggtaccgccgtccagttcagtttgccgtcctcggatcattttgccctccctctttttcattagcgctatgctggttgccattccccctggtggtcgcgtggcgggttttgacgatcctgcttgccgcagaagccgccttccagatactgtctggaacgacatcctcgtctccggcggcgttgtctctacaagaagtgtgagaagcttattcacacatccgggaaaactcatgtcgagccactgggccaagaattgcctcaaacgaacatgcacgcctgctttcgcccagctatctctccggtcaaggttgctgcgttccagcttaatttcgccctccggttttgcagcaccgacatggtttttaacaatgcagcacaccacacgtacgtcttgcagccgcgcttggggagcttacgccttcaagttctctcccgtaagcagctggtttcaacgctgttgaacaactgctacggcgaggcccgcgcaactgtgatgctcaagccccgggatcgaaaccgcaccctcgttactgatgcctgaatggacgtcaatgggctgcctgtgtcctgcgtgaggaggcgttagccgtttcctcgagatcttgtacacgggttcaacctcgcacgacgcttcctcgcggctgtgtgatggctaagaatcccttcatccgctacgttgcagtggtatggataaccctgcgcgtctggccacgcgtcagaaggagtaccaggttatgctttccatgactgcatctcgcacgcgctgcaccttgtggtgaaggactttgtccccaagctgccttgacctcaaaagatggagcaggactgccatcagttggcgaggtttctcaataagggccagcagttgaggcacgagcttcatcacccgcagcagatggatgtaaggtggccctcagcatgccgtcgacacacgctggggtacgatcaagcgctgcttcgctagcatcaaggcttctgagaatattcttcatgcgtttgtaaactcacaggatttttccaattcgggtccaaagagcagaaaaccacgcgaccccttgcgcacgacacggtggtggcgcatgactttgtgcagtaaaaaaatattcaactgctagatgtgctttcggcgttcccaaaggcgtttgagaagaacgcaaagtcgccatctgacgtctatcgtatgttcttggagctcccatattgcgatacggtgatgcctattagcaaactgggtgatatcacctggatccgcgaagatcgcttcaacgtcatctactgcgacgtacacggtgtagcgtacttgctcgatccacgctatcttggccgcgagacggacgaggactcgcgtcaatggaatggtatacatgtacctcgaattccccgacttttttcatacatggtgtttgagaaagagcttttaaagtgttaaggggcatataggatacccatcaacatcaacacgatcaaagaattcataccggcgatgtagactaggcaagaaagaaatatttctgatagaactctgttttggtatgcggttctctaaagtatcgtcgcgcactatcaaattatctacaatgattatgatctatgaacattgggcatgttaaaattatagggtcaagcacatgtatgaagcgaattcctaactacaagctgacttagtagtactcaaattcctcgtcgcagttgttgatttcctcgtcacaactagcatccgccatgttctccatgaagccatagaactcaacatcttcagcgtcgaagttcttggcgttaaagaaaaggaagacaagcttatcgaccgatgcgtcctgaagacggttccgagcctaggagtggacaaacttgtgaactgagagttgcgctcagcagcagctctggagcaactagcgcagaagaccgtaagtgtgatcttctgaagcatcgagaactggaacaagccgcgccagtactcgaggaccgtcagcttcctgtcttcaattcgcttggcttcatgcgatcttacttgactcagttcaagatacttcataagctcgaccgcagtggcgtcttcgttttcatgagctcaatacatttgtattgtattgactttccaatttgagcctttaggccggtacgaatagctattactttcgccgaaaatctctgtaaaatgcgacgcagcgtccggcgagcttccccatagtgacgtgttagtagtgataatgtggaaacaataagcataagttgtttaccgcgaagacgttgactaatgcgctcgggcaactcacaccggtgtggtggagcaagaagagaattttccgaagtctgaagccacccaccaagatcaagtgtgatctcccccgagagtgacaccgacctccagaagagtgaaccccgtcgaagatgatctagaccaggggatatctgcttgggaaggggtgacgtcgatcccgggaaaggaatgatgaacttgtatccggatttcgtcaacgaccagcagagagtcggcgccaccacgaaggccgagggagccagcgagcatgcggttggaccacaggagcgtgagagaacgatgggacaaggacttaggcaaggttaacattttggacagagttgtgtttaccttctactgatcaagtggtcttcgcctccgcactaccgggcacgggatatactttggcccacccgacgctacgcaagtcgacttataccccaagatcaaggaacctcggacgccaggatagcttggcccagcgtccgtcaaccctcacttcgacccaccgctagaggaagcggcaagcaagcaaggaaaggaaaggaaggtcatacaccgaccacaaggtaaccccaggccaagattacacctggccggcgagtgtcgatctagacaaccccagatcgaaaccgccacaactactccggcacagagtgaagcatatccgcgttgctgccacatgtccccgctgtccgccagacagtccaagactcaaccccaagcgcgtcttctcgagatcacccgaagagtgatccagcccaccgacgggtacacaaggtgaggatcagcaacttcacggaagatcggagtaccccctccgtaagtcggcagttcgggcgccgtgtgcaagaggacccccgcgatctgcaaattttgcggagccgcttcgccacaccggagcacgcggcgccgttcccgtctagtctcagatggacgtaatatactgcagctcgaagttgcagatgatctgcggagcaaaatgctccgcggctcccaggttaagactttcatacccttcccactgagccaggtacaacgtggccccgttaatgcggcgttttgccaaattcataatctccctgcaccgtcctcagcggctgcaccaaacctaaatcctcggacaatgaagctgccttcgtcgtctgatacactgtcattgctgacgttactggggctaggaggcgtcacagatgtacgtagcggggcaacgaggctaaaccgcccattcaacagctaaaacgttgcggcatggcgctggttgggcgtaagaggcgccatggctcggcttgacgtagaaaatctcgttgtgatggcagtagtgatgacctacgagttcgtataggctagctgtcgcgaggctgagcgcgatggtgcccgatgagttaattttgcggacctctaaaacattattatctctgaaatttaaatttgttcacttacatatattctatattttaaaattttacgagtggaacattttctagaaaaactattattatagacttggggctgttcagtaaggctgttcaccaaaagtcttccaggttgtgcttttaggtattgtgttgggtgcaacattccttttacacattaaccgaaagtacctgtcggccaactctgctcatctcagaagccagcaacatccacccttctccaattgaagcattgtttttggcgcttccaaaccgggcccagaacgtatcgtagagccgaataaggtccaccttgtccgcagttcattagagcacgctgaactacgcatccttaaaataactcggcttcgttatacatatcgacgacagatatggcctgttgggccgatttgcacagtacaaatcttcccgcacgttctatatagagtcagtatagactactacggtaggccataacaaaccgaacttttttgatttgtgcataaactctgtcatatcgccggaagatatggcgcactggacagacaaagactggaccaaaccaatacaaaaacgaagtgttagtctatgcacaaaaacaaagtttcagtttgttatgacacacatcacaaaagttttggttggcttgtggtgcaaatacgcgaattgtttacgcattgtgtcgacaatacgcctatttgcacctcaagccaacccagcaccaccttgtcacaaacaatatcataaaagggactaaccgtcgctttcaccgtactttattgggatgcccgcctattttaaccgtaattactgtgcatcatgctgaaaggcgtttcggaagtgctggacgcaaacaaatcgctgaagtacttcaatttcgtgacaccgatcggttactaaaatatatcctttaacttatttttgaaaacgacacttggaacctatgaatcgaactcttgtcctctcacttcagacccgctcgcgttgcttagcgcgtttgcacctaatcatactgcgacaagtacatgcaagaagcacaagcgtcgcgcaacgaagtgttatggtcctctacatgagcacgtgttgcccaatggtgtagccttggcggtggcactgaagcagacaggaaggataaattggtgttatgtgaagaccgtgttttccagtcagcttcgaattccttaatcacctcgccattacggggtccgatttccagctacacgatcaatgcagcagaactaactcactaccacgcatgtaaaatgaacagggcggagactaattgcaccggaaatagggcgagccggaccgcaaatcatttccatcaaactggattacacttaacccggcaggattcacctgaactggaccggcccacgttatcattttgagatataaggtgttcgcagaacgaagtaggattaccccgtcatgtgcctaggtttgcaggagctacagtttcaagcacatcaagtactgtacactcttgtttgctcatcaagctagtaattgcagtggccgtggtagttgtagccggacggtaaattcaaggatactacaacaacacttcacgatgggaaactgggcacggcttccttcataataaattaatttcctttagatattgggtacatcagtaatctaaagtgacgttggtttcgacccctgannnnnnnnnnnnnnnnnnnnnnnnnnnnnnnnnnnnnnnnnnnnnnnnnnnnnnnnnnnnnnnnnnnnnnnnnnnnnnnnnnnnnnnnnnnnnnnnnnnngccgatttgcacagtacaaatcttcccgcacgttctatatagagtcagtatagactactacggtaggccataacaaaccgaacttttttgatttgtgcataaactctgtcatatcgccggaagatatggcgcactggacagacaaagactggaccaaaccaatacaaaaacgaagtgttagtctatgcacaaaaacaaagtttcagtttgttatgacacacatcacaaaagttttggttggcttgtggtgcaaatacgcgaattgtttacgcattgtgtcgacaatacgcctatttgcacctcaagccaacccagcaccaccttgtcacaaacaatatcataaaagggactaaccgtcgctttcaccgtactttattgggatgcccgcctattttaaccgtaattactgtgcatcatgctgaaaggcgtttcggaagtgctggacgcaaacaaatcgctgaagtacttcaatttcgtgacaccgatcggttactaaaatatatcctttaacttatttttgaaaacgacacttggaacctatgaatcgaactcttgtcctctcacttcagacccgctcgcgttgcttagcgtgtttgcacctaatcatactgcgacaagtacatgcaagaagcacaagcgtcgcgcaacgaagtgttatggtcctctacatgagcacgtgttgcccaatggtgtagccttggcggtggcactgaagcagacaggaaggataaattggtgttatgtgaagaccgtgttttccagtcagcttcgaattccttaatcacctcgccattacggggtccgatttccagctacacgatcaatgcagcagaactaactcactaccacgcatgtaaaatgaacagggcggagactaattgcaccggaaatagggcgagccggaccgcaaatcatttccatcaaactggattacacttaacccggcaggattcacctgaactggaccggcccacgttatcattttgagatataaggtgttcgcagaacgaagtaggattaccccgtcatgtgcctaggtttgcaggagctacagtttcaagcacatcaagtactgtacactcttgtttgctcatcaagctagtaattgcagtggccgtggtagttgtagccggacggtaaattcaaggatactacaacaacacttcacgatgggaaactgggcacggcttccttcataataaattaatttcctttagatattgggtacatcagtaatctaaagtgacgttggtttcgacccctgattgatgccaataagcgtaatctggtactaaaagcatgatgcgaggtaatacttcagcttgcggttgaccccttatgaaatttattgtactatgtgtccagattccctagcggtttcattattggttaaactaaccacttctgctactccgacaccaacgtagggcgaatgagcttcatttagttttcgtgcgacgttttcagaaaaagtttgtttcggggctggaacaccagaaatcgggccaggtctacaaactggtggacacaacaacagtgcatgagccagtggcaactcgtgcaagacatactggcaacgctgaccaattcctccttgcataaagagagtcggggccttaatcatttcgtataaaatgaccaaaagacaagtatgatatacatacagctagtaagcataatgacaaaacactaagacaaagttttcttgtcgagatactttcaccgaacgggtgcacctcaagtaagccgtccaagaggtcacggtgatctagtagagttagcctgccgactgaagattgtgtatacgccaaacagctcatcgaagagcatactgcggatgcgaggctcgtgatgatttcgaggcccttgtcgtttttgaaaggtgctcatcaaggcggaaataactctgaccttgatgagcacctttgtcgacgaccatcacgagccttggcccgttgtataagttcagcactgaaggaggataccaaagcacttggacaactcctcaccgatggccttctcaatgcctttcacgacgctttttgagctcgcaataggatacgacacaaatcagcggcatggtgataaaattaccgttaatgggggagtccaaacgataccaatagaaacggggtatcccatatagtaacgccatcattcaaggaggtctcttccgacccgcaaaaacacgcaagatattgaacctcacaatccaacgcatgctcccggctttggcgccttcgggtatggctcaggagtcaaccgtcccagatagccacagcgcttgtactacgtatcgtgcccccgtagttggggtggcagccacggacgtgggacaccaagttgctgtagcccgacctagacctgtgtgtgatggagtggatcgccggaactagcaagggtccccctaagttgcggtatctttcatctcgaataagagccaaagggccccgttcatagtgtgctggagcgggcctatctcttacatttagactctgtacccatcctacccataagccttaataaacaacgctaagagcatctccaggggtaggtctcaacggtggttttatcctaaaagtaagcacttgagactcggacgagacttgtggctcccattattggcggttttaacttaaaaaggacctaaatgttggctttcgagtcttaaaataaaactcgaagcttaaaagtcgtggcttgatttcagtatagtgtagaggaaacgtcactttgcactcttcaacaatgggaaaaggaaaagaatgcagtgaaagcgaaaccatccagctctgtcgctcgtggctggagacctccgaggacgctgtagtcggggctgggcagaagaagaaggcctttttaagtaggtggtatgaggactgactggagaacaagagcgatgaagacaaggaggatcgctcggagactgccatcaacggccgctggaagaagttgcagccggaggtcaccaagtactgtggggtgtacggcaaagtgaagagcaggcagcgctccggatggagcgaggagatgtagcactcaaagtctacgcggaccgacacaagcaggagtttaagttcctcccggcgtggaaggagttgaaggcggtgggtgttgccggcacagctggagcgccgccagcccccgaccacgagcaacctcgagctggatccatcctgacatcgaccacgacttctcttgaagccaacaaggaaaacgagaccaacacaagcactgaaactttttcaactacgttagtttaaccgtcatggcactctacatgccatctaggccgtagcattgcagcatcaagcttatctattggcgttcgccaaatcgacgccatacgtgctcgatcagatcggtttttaactcgtagtgaactacttcgtcctcaatggcgtccaatgcttttgcaattgtggttacggggctctcggcgctgcggcaggtctggcagggctcacccagttgtcgtccaaaagatagtcgtgactcagcgagctgaatggcagcttgtccacaacaatcatgttgtggagtatgatgcaggccagcaccacgttgttcattgcgtccactttccacagcttacacggcagtgcaatgattcagaatcgctcctgtagcacgccaaacgtacgctctacgtctttacgaaccgcttcctgctcgaccgcgtagcgtttgcgtttgttgccgtgtggagcacttatactcgattgaaagattacccaggctgggtaaatgccgtctgtcaggtagtatccctggccgtacattcctccgttcaccgtaaactgcacctggggagcgaccccactcaccaggtcgttcaacaacggtgaacgctcaagcacatttaggtcattgttagcccccttcattccgaagaacgcataccagatccacagcgacttggacgcgacagcctccataatgacggtggacgtcttttctttgccccggaaagccccttcccaagctgttgggcagtttttccaacaccagtgcatgcaatccaagctcccgatcattccggggaagccacgctctgcattctccgcgatcaagttctccaggtcatcaggcgtcgtttggcgtagatactctggacccagcaagcgaataatattacttgagcgactcgagtcgccatgtgttcgagtccttattataagcgttgtgagaaaacactttctataggcattgcttcaacaaaacatttggtattagctaaggcaacattgttgtgattggttaataatttcaacttcaactgattggtaagatactatttacgatcagacttataactttgccgaaactttagactttaaagttctcgtgaccaaaccggagaatattagagcgtctccagcggtcagacttatcttaagtcttaacaggctgtttaagacctcaaaatttagaataagtcgactttgtggtagcgtgctcccaccggggaaacttaatccgaggcttaattaatcgaccaatcacagcgtcttttacttatcccaacgaaggcaacgatggagggaggcttgccgccgatgttcaacggctccaacgcgttcgacgactcagacgaggagtactaccttacctacatggtcacggatgacgccagcgagcccactcccaagcatggaggttctaccgcatgaagaagagcaaacaaggagcgcgaacgagaaatttggggagagcgcttgatgaaggattactttgggaaaaacccgacctacgatgaccgtgcgtattagacctgtttagtgcagtgcacaaaagtccctacaaatgcactaaagtactttagtgcacttttggcgcacctgcacacaactgatgctggacattagcgcgtgcactaaagtactttagtgcatttgtggggactttcgtgcactgcactaaacatgtctagtgcgtatatatctgttgttggcaatcaatgattcagctacttttgctaatactatgttatctatgaacaccgtagaggacttccgcagacaatttcggatgcgtcgtaacatctttgaacgcattgttggcgcgcatttttggcgtcctcggcgacgatgaggagtgcagctacttcgtccaacgtccagatgcaactgggaggtttgggtttcttcctgagcagaaagtgacctgtgcgctgcgcatgctcgcgtatggggcgtccgccgaccagctggacgagctgatacgcatgggggagtctaccgtgtacaagcgggtagtcgctcgaaagcaatgcattcatggcatatcgctgaatagcatctacgggtcagctagtgcatgctcacagtggtgcagcgcgccatcgtcgctacgggagcgataatgcttttggtgctgttcatcagcagacacgcatggccgaccacagcaaatatcgacggatattccagatgcacaacgaatgtcgtgatccatggtgaattgatggagacaatacataacggattgcagcggatatcgcccttccgtctcgtagggaaggcaggcggatagtgcccgatctccgtgaaggacctctggcgataccagcaacgacagtcactgagtgtgctctctgtggatcgcattacttcttgaccacatctctggagatatcctctattcgagatattataccggaaaagtcgtattgatagagcacccggaaagatagagcatctagcacattgtcttagtaaatagttcaaggccatattatgcacggacgaggtcacgacaggacgcaatgtagggaaaatgtacatcgtattaaaacacggtgaggtgcttgtacagtgcttacacagttacctcttctacaatgtccgtgtagtctacatggttgctgcgcttgggggcaggcgcgctggcagcactatttggaggcccatacggcaggaaagggcctgcctttagaaacgagttttgaactgtcgtggcggaaacacaacgaagccccccattgcacgctcgaaaatctgatgccgacgaaacgcaggcgttacagtcttcggtcgaagtttggtccatattgaacagtgcacgtgtaaaccgtgaggctagtattagggtcaaacatacaatgctgcgtcgctacctcagtcacttgctcgacaaatggcagccgcagagcttccagctcttctcgagtcttgcggcctgagtggcagatgcgtcgaatggtgaggtggtgccggcgcaggaagcgctggcaccaggacttcttggcgtccgggcttttgggccccatcacctccggcatgagctctgtagccatgtcgatgatgaaatcaaccgttacggtgtgctccagccgctgctcatccttgataaacacgcacaatgtgtcctcgatcagggccgtgtcgggcttgcggccgctgccgctgagtgtgaggcgggaggcacggtagggaaccggagggaggtaggggctggctcgaggctgacgctgggactcttgggccaggcgggagtactagcgctcccagttctgcagcgaagggcgggggaagccacttgactcggcaaacgcactgcggctcgtgccgctagcgcgctttgaagcggttggtgtgggctgcggtcgcggggcatgctgctactggtttggaagtcaggcttcttctgctgctggaggtttgcgttgtgtgcttgccgtctcggaggagccgaacagttcacggcgcacgtcgatcagtaattttctaccgtgttttatagcaattttcgccttgtcgcagtactatcacaattatcggaatgatagagcacagcgcaacccgcaatagaaaattggggctctatcaatacgacgtttccggtactactgctgcgcctccagtattcgtgaccccaggtgtctcccctcgttctatccagggatttgggggtggggcaacgttatggaaagcaggtgccagcatgctacacagagtgggattaacgccacaaacccgcaagccggatgaagcgtttagggggctttacgggatcgctgaatatgctctatcctatcaactgtattgggatagtaatcactgtggtttagatcttttggtactgacagggagagacacggtcactcagcggtatattttacgcaacaaaactgtccagccgtatccagaatggctgccctatctagaaatccgacgcttcgttccgtgataggcgcctatctcgtctcgtgagcggcatagccaaatggtcccacccacggacgggacaattatatctgaccaagaggcgaagtgtcgcgggccaggtagttcgtcgactcctcctcgcccactattcggaacttatgtacaaggcaagctgcgctacggagctacaggtctcaacttcactggtcagccatacactgatggtaaatacgccgagggatccggtcctcaagatgaacatatgacgcttgtatcgggcacatgtagaaagtgcaccagcaacaagcggttgctgtactgcatggccgacgtcgagctgccacgaccataaatccacctacgcatttgattacggtggcatggggatgtcacttggcgctgacgacgccgtaagcgtaaacggcggatatacccacaccagaccatcggatccctgcgcaccttgcggttcttcgacggtaggtctcactgggaccccgcacctggcggcacagggatggttattagacataacgatggggtgaagctcacgcctcagattgtgtggatggctagcgtctcctgcatgcccaagacgaccaacaagattgccgagtattgtgatctacttaacggctgcagtatgttatccggtgcaagatgatgggagcccacattgtcaaggttgtcattgaaggcgtcgcaagcagcgtgggatcgttggacggtggtcgcgatgccggcactgagcgtgcagggggctacgccgccggagtggccgccacgtagacggaggacgcgctggagctctccagcgcgtggagaccgcggagaccgaccgggagacagctggtgcagctatggacgtggaacatgcctcgacccagacatttacaaggactttattggcaatgtcagttatgtgcggaccgactgatgatggcctcccggtctcattgtttacgacacacacggcggacggagtagccaacctgggcatggatagcaagaagggcactcaagtaatcgctacggatatggcacgcctgccttcgggctggacagaaataatcgcaccccttcaagcggacgttgagcgctggatggacaacaatccagatcagagatgaggtaggactccggacctccccacattctggagcaccttagcgggtacacatttgctggctctactcgatgtagtcagcataccattagataatcggtaagcatcagagtgtggcgctgtgaatcttcaaacacacccagcgacaggtggcagcctggcgccagaatgtgatccagtccctcaagattctactcaggacgctagcaaggtaaaggggaatctggcagaatcccaagactcaaaaggtatcaaacaagaatccccggtgcccagcacgatggctggacttcaaggtgcatggctggatcgcaagacgccaaggtacccagtaggtcgccaagaagggcaagcagcagggtgtggaaggatagctagcgccgctttcatgttttgcgttgctctcagaattcaatttgctttctcaagtgcattggtcgtcatacagagggcaggaaatgctttaggccgtaagttaccctaaatgacagttatacacatccacttaacaggcgctgtccctagtcatgtacataaaagtggccgcatgcacactcgctgcacttgctcgtacactgaccacgagtacttacactcgcccatgacgttcattgtcgcgtcatcaagcgaagcgacgagaagctgaaacgtctccttgtcctgcgagttggtgagaagctgaaacgccttcttttactgtgagaagaatgcatctctccatcgctggccccagtgacaatagcattttgttcgctgatctcccacacactttcagtagagcttgaattcgaatctatcagggtgtaaagtttgttaagttgaagttccagctgtttttcgggttggagcgcgccatggtcttggcttcgtggcgacttgtccttttagccaagctgcactcagagcctgttgagggtgatgggggaagtgaggaagcggtattcatggagagttaggccgaatcacatactaatatcgaggaaaaaggcaaacccatcaaatgggatcaaacgcataccacagaggtaaccgcaattacactcactgatactaatttgtgtaagacgtttaatttttcgttcacacgatatagtctgagtaaaactattgcgaagcgcggttggaatatccacccctaattagctaacatatttatctttattggatttgaaaacctagggacaaagcgaaatcggttagcaaataggagtgtgtaatccagcttgggccactaccaaggcgtctttgggccgatatttcccggaggttgatgtcatccgtgccaattaggatgctatcctattgtttatcttgtgcaaatatctctataggctttggggccttacatatatcacgctacgaagctggcggcttgcatcgacacgtacagagctataattatttagctcaaatagctcggaatgccgacttgcacggtgacattacgccttatttacaaacaaatctgttgcgaagggcatgagagtgtccgcaccggtagagctatttctattctaccggtatatttagcacgagaaccacctgtttattttagaattggcagtggtatagcatcgtcctattagcggtgttgctagctattttcctgtctcttgcgtgttaggtaatggacgtcaccgcaggagctgagtgggttgaagcgttcccgaatgaagctgatgaagaggaacacgcattcatggctatcattgatgccacgccacgcggaatctgtgtacaacccgagcctggaggatcaagacctgggcgcgcacccaacaagaaacgagatccagcggctcgccacttaagactcctacagcagtactttgggcccgagccaatatataacgagcgtgaattccgaactcggtttcgaatgacctagcgtttgtttatcaaagtcttacaaggagtagtggagaccgactcgtacttcgttgagcggcgggacgctactggaaaactcggcatctcgagcttgctcaaagttacagctgccttaaggatgcttgcatactcttcggcagctgattccatcgacgagaaccttgagatagtgtacttatatgcttgaagcggttttgtgaggccgtaattgagcgctttgggagtgagtacttacgatccccgacgacttcggagcttcaatcaattctagagcagaatgcaagacgcgggttcgtcggtatgacaggctcactagactgcatgcattgggagtggcgtaattgcccgaccgctgtagctgggcaacacaaaggaaaagagaagaaaccaacaaagatattggagaccgtcgcagactacaaccttcgcatttggcactgcaactttgggtctcctggttctctgaacgatatcaatgttttggataagtccaatttgtttaacgaattcctgcaaggtaaggccccacgcgtggaatacacactcaatggtacgttaatatttttcgcacaatgtaccataaaacactttaggcttattatatcgcttatgtgaactaggcacgaaatgcttatctacttgcggatggtatctatccagagtgggctgtatttgcgaaatcaattgagcggcctcgcggaagaaaacaaaaacattacgccggatgccaggcagcctgccgtaaagatgttgagcgttgtttcggtgtcttacaagcgcggtggcggatcatcgacacaccatgtcggttgtggcgcgccgatgcaatggcaaccatcatgcatgcatgcatcatcttgcataacatgattgtagtggatgagctggatgatccaagctttacgcacaaatatctgttcgacgaacaagctcaaccaggggtgctgcccgacattcgcgttacgcggccgactgcggccggccacggtcgcagatctcatagcaaactcgcacgtcctgcacagccaacgacagcactttcggctgaggaatgatctcattgaccacctgtgggagctacatgggaacaaggattcatgttcaatgtcggtcacggaacgtccgctgagctctaacgcagacacctgtgcatggcaagcaacaaacttcgatacagcagcggaaatggtttgaaaccttgagctgagcgaggttattactcgtgtggagttgagcttcccctgggctcggagaagctcttcgaagacatcttttactcgaccgtaaaactcttcgctgttttggttgatgcctattcctccgtcttcactcacttcgatccacgcctcgcaaagagccttatcttcggcagcacggtagttcgctcctcgaacgcgaccgctcatcttgtgcaatggccaataattactcacacacccgatgctattttcactgccaaatcttgcatccgaaatagctttgaggctcaaatgctatttttatttagcatttaggattaccggtggctcgacctggagctattttgctgtcagatttcgcacttagcaagtgattagcactaccggtgcggacactctgagcctgcctgctaatcgccatgataattccaagtctaaaatagaggtggaggatctaatttggagatcagtcgagctaaataagactttggagtctaaattagcccaaaccttgaccgatttactatccgattagacatttggggtatatctccctgattttagaaaattaatatcggcccgattttgctaccgacaaaatcactgaaagattagcacttacggtactgatcctccaactttttgagtcgaaaagtgttcgaaaacacaagtcgactctgattggtccgcccttatagctccaaatacatcgtcactgcaccgatggcgcccgaacctgagggcaagtgggtcttcccggagctgcgcgccatgatcctgcagtcgacgcggccgcccgcgcccactccggacgatgcggacaaggagaacaccgagacagagagccccttggtgttccgcacaccaagtttcctgcagtccgaggtgccgtggcacgtggagcagcagctgagacgcaccacttgcgccttcgtggagcacttggcacagctcctggagatgcccgacgcccccagcatcgcggcccagctgttcgtgcagcggttctacatgctgcactcgttcgcgacccacgaccgcttcctggtagccacggcggcgctgttcctggccggcaagacggaggagttccccatcaaggtgcggtacgtcacggaggcctccatgttcctgctgctgtgcagagagcaggcccaagagaagctcctgaccaagcacaaagctaccggaggcgccaagagcaacggagtgtcagcgcctcgacggtcgccgtcgcctgctccgccggccaagaagaagcaaaagctcgactccaagggcaaaccggtggagatgagctcgacgctgggcaacgacaaggaagcagcaaacgccaagcacattgagtggctgaatgcgttgctggaggtggtggatgtgggggaagtggaggccaattcgagcaaagtgctgctgctggagcggatcctgctgctcacgctgtcgttcgagatcggggcgccgcagccgttcgcgtatattgcgccgcatatggagcgagtgttcgcgctggaggccatgcacccagacatttcgtacgagaatactcgccagatcacgttcttgctggtcgcggacgccgtgaagagtgggttatgtctggcgttcgactgcatcgcgctcgctgcgggagcagtgtatctagcctgcttgtatcatcaccaggtggtgccgaatgttgcaacagagaagaacgagccctggtggaccgtactagagcttcccgagaaggagcttgaggaggtcgcgcgatgctacctgtggatgtatgaagacgagaatggacaaaaaagccaaggacttggacccgacttcctggatttgtggacacgatatcggccagacgataaccgacccgaccttgaggctgtcaaggcaatagatgcaggcttacatacgccgtaactcggagaaaccaggaggaagggtactttttgatgtcttttaaatctgacttgaccattgcacaacggcgcggtagctccttcccagtgttttcctcaacccatgcagcgtggtggacccagatgaaattcgctttacacactgatcggtgtcaccatcaaggcattcagacccaactccgcgccttgcgagggctatctagcaagctcttgatgtagaacacctggaagaagcacaccacaaggtacacgacgcattccagagctccgtagaacatcacgtgcttgttcatctcctcctccactgcagcacacaagcgccagaaaacacattagagactgtcgccttccagcaattaccgtgtctcagtccaaaagcgcacctttgatatgcctgtctgtccgaatcagctgcagtctctgctcggactcgagctctccgagacgcacatccaggtgcgatgcgtacttggccagcacgctcacatgctctgcagcaatcacaacaacctcatcagcctaatgataatagtcaacaccaacccactgtaggtcgccgcacctttctcgaccggatgctgcgactgcagcgtgttggtcacgtgtgtcaccagcttgccgtccgagtccgggttgatgaagcacagctcgtgcacgcccgcttgcctgcaaccacagcaccgtcagagccattcatctggccaatcaacgcgtctcccatgccaatgcgtctactcacttgggcgtgagcagatattgtccctcggcgtccccaagtcggcggtagatcgtgacgccctctgggttcttcacctccatgtcaatgtgcgagtcggcagagctcaccacgtaggccccgccaagctcgtcgccctcgaacttggcgtcctggtagaagcactggctgctgccgccctccacgtagaacgtcaggccctcggacgggtcgaagtcgaagctctcgacggtgcggcccctgggcgcgtactcggcgtctgcgccgacgccacgcggcttgtcgtcgtacgggtcgaactgcgggtcctccgccactgccgcagcctccgggtccagctccgcgaagtcgcccgccaagatcccaggcagcgccagcagcagcagccgcgtcatcgagcgcaacatcttcatcttgaccaatatcggactataatggagtatttttgtgcccgataccaatgtttgtgtctatttggtgtgaaacacatcatttttaagcatcatttcaatttcaatccgaattatctgctgagtatggaatcaatactattgatgctgaggctggtagctaccgtggagcagggagcagcaaggctttatttgctgttttgaccacggtaaggtgaggaatatatatgcctcttcgtcttccgctcaccggaggcctagcaccatattttgtatcatttgaagtctcgagttcatcactccttggatagatggaatcaagaagtcggcctcgacgtgagaggatccgccccctgcacaagagcttccgcctggatggacatcaaagctccaggcaactttggttctatgtcctgggtcagtgctggttgccgcattaggctgaacccgctgcacacgagttgttggttacatgccgccacaccttcgaatgccccatgtccacagaccactccaccgtcgactccatcagagcaacgaagcccccaggaatggttaaggctttcatcaccaggtgattgccaccagtgacgagtatgccgttctgtagtttcacgggcaacaacaccttcatcgtcaccgtgtccgtggagcgccaggcaacttcagcgtccatcttgacgccgaactgaatacctcccacagcgccttccacacgtcttcctcgctggaagagatgaaactctcccgggtgaacttgattgcaaactgcccgtccgaaggattcagcacttccaccgcgtcgacgtctcggtctgcgtcaataggcaaagtggtggacagagctctaacgacagcaccacacttcgagttcagggtctcctccagcgcatcaaagacccaagcgttgagctgaaacttccggccgacgcagagttccttgtgaagggaccgtgacgcacgcaaatgacagaggctctggagctggtcgttcgacaagagctgctccaaaattttctcttgggatactgcaacgcgcttgagcactcgttagcgcaccttgaggtagatccgatcggccagcgccttctggtgtcgcttccgatctagccccgcctcccacttctctgattcgagggcacgacgtcgctccaactcggtcagctgcgtcgtcaactttgccgattcttgacgcaaggctgccaaactctctttacgacgaagccacgttaacttttgcttgcccttcttcgtcttgcctcatacagcatcaagcactcgccaagccaaagctgggcacagagcaatactcaaacaacatacagtaatcatgaagcccagcgtagtaatcgatgagtagggagcagcgcactcaacgcaacttgcttgttagcgacggctgcctacgccatggagactggaccaaccgaaaacggtttggtcattttgacgagagttcatcgtgtgtacatagtgtacacagtagagtacaatagatcgacctcgaattgcgcttttgaaaacgccgggctctcgggcaagaagataatcctccctggtcacgtgatgacactcccttgttgacgcggtcaggtagaaaaccgaggtcaccacataatcaagccattcgagacgattcctccgcttcggtcgcttcgaagcattcccaaacttgacacgagcaaacaagtcatcttgaccaagacaagaccctgatgcagcctttccctgttcgtatcaacgacccgctcctgggagcgcccaaccatttcagcatggactcgaccgttgtggggcctctctttcctcggtccaaacgcgataccaaaagttatggcaatgcccctggctggagcaatgtgcgcagcatgagccagagctaccatgatccatacgaatactcgcctgttccgccgatgccacccacgccgctatctctggctcgacccacctcttcaagcttgatcatgcctccacggaatgtcgatcctggtttgtccagtacaagctcagcgtccgacggtgaaaatcaagctagacatgctcctggtcctggcaaggccaagccgacgcagaagaggattcgacccagcacagaacatcgtcgggagcagtgccatctcaatcaggcccgataccgggacagacagcgtacgaagatcaaactcctcggacaagcggtgtcagaaggatatttctctgctagaacgccagcgcgatcgggccctcttcggaggtaagcgcagcgtctacaacgtcattgtcgagtacttccacctctttcgccacggcgtcgacgtctcccgtggttgcctccaaagtgacgcaacgcagcggcaacaagttttcttgcgctactcgatggcaccgaacgtagttctaggcgaagactaaggggtgacggctctcatgcagcgatggcaccggtattcggcttgcttccaggacctgggatttcgtctagatcacatgagcgagttgtcaaagggcctcatcgttgtgtcggcgtcgatcagggtgaccatcacgaaggagacactgaaccaagtgtttccgcgcctttcggggggccgtcacggcagccgaaccggtgagcaacaagacttcaaggccgtgagtctgggcgtgaagctgctgctgctcccgtcgactctttattttgagtgggatcgcgtaactatgcaggtcgtgcgcttggagatggcggtggacttcttgacaccacttcgtcgggagtttgggaacctggaagatgcgtcgttcgtgctagatggggcaaacattgcacccgacagcgctatcagatactcgtgtaagtgtctgatggaccagggaagtggtagaatgctgtacatgtacctacgtacccagttgataggaacgatggcgaagttttaagttcaacacggtgctgtttacttgagttttgggtagtacccacccacttttgctgaaaaacagtctcctactttttagtagtagatgctccacgtacggtgatgtggcagcaattgctgcttgttgtcctcaccaatttgccacaacagccagtcgagttcgattacttggagctggtgtcctcggcttgtcatttgctcgtggagcatctccaccgcttgaatagttgcggcgcgaatttcgatctccatctaaagtaaatgacagaaataaggttgagcacactgcaccaaacacgattgtacacaggtaaatgggtagctgcctcacctcacttccagctggaatctcagttttactgtccaccagtttcgagagctccgatgagtaaaccatcacgccttcagggcgaagtacttgtgggacacgatagtcagctgcagcaaataataaaaataaaacgactcagccactagaaaacaactaatttccgcgtacgagcttgtcccctaccgaacatggtcagcttgccgatatcatggaacgaggcaacaccagaagtacgacgcccataggccgcccacacgtcgccgaccaaaatctgcgcgcgcttgtagaaatgcacctgctcgcccttgtaaacagcatggtcccggaagcctatatcgcagtggttagcttatcagcggaccagccaaacaattgcaatgatacgagtgcaggccacctggaatattcgcaagcacgagccggatagcctcgaccgccgaaaagttggcttgcttgatcatattgagggcaagtccgtcgaagaagtattgcagtacttcccccacttcacgaactttacgtcggcgctcgtcttgctgcgggggtgtgaacgggtgaaaccacgaagccacggtctcattggtcacggtcgccaagttggcggcgtcaagagcatgccggtcccgcgccagcgccgtcttgagacctcgtgctagatgctcgtactccatgctgtcgtcaatcagccagacgaaaaagattatgttagtatatgtttaaaatatttaaagataagaaacaaatagctaatgtagataacttacttttccgtgggccagaagcagaaattgagtgcgtccagcacgaacacgtattgacaggtcagcggaccgtcctgctccacgtcttcaaagtagtggaagtccccactgtcccatgtcaccgcgccttgttggtctccactcaacctattgccctaagattattatcattcttaggatacgataataataacatatttggtcgtcaatagtagccatttccataccaacttgacagccagtcgctccacggcggacgagtcgatgctcacgtgggtcgcacactgcgccacgcgcgctgtggactctcgaacaagcgctgtagggtccatggcagtgctgcagagaaggccctcgacaaggggcgccctttgaccaccaagcatcagatttgcataaatgaaactatcaaaacaaatagttttgctccttaataaacagatattcgtttcgatagtttcgtttaatgtaaggaatccttattacatagcacggcagcgacttcgttttttgcgctcttccgcccaaacaacggacaccaacgaactatgaccaaccatgtctgccaccgtgatcccctcggtggggccatcgatggctgaacacctccacggcctgcgcggcggtgctcgacctgactttcaggaaccactcccctcgcctgcgccgcttcaagagctcttcgaccatcaccgggctgatgttccccttgaggacttcctccgtcgggtgtgtgagactcggcctactggcacggccactgccacctttccagtgatgctcgactccggcaacttcttccaaggggtgtcgatgccacgcatcatagactctctgattcgggacaacgggaactcggttctcaaacgtctactgcgtgagcatgctttcgacgcgatcgacaaacgccgagatggcggcttacgcatcctggttcgcacaagcgaagcgcagcaagctttgaatggcgaagaggtatcgatcatggggaggaagttccggattgggctagaatcgcctctggctcaatgcttcttccttgatgtgatcggcctcactaccgcggaggaggcactcaccgtgttcgggtccctggcctctcgtggggctaaacctgtgtacttccgacctgctgcttacgataaggtctcaggcctttgctctacaacgtggcgtttgtactttccaggggaagaggctccaccaagcctcttccgcgataggagcctacgctcctacgtccgtgtggggaggaaatcctaccgatgcttcggtaagaatgacgcgtctgggggccgacctcgccgtcaaaacccaccgtgggaaaccccggcactgcgtgtgcatcagcgcacgagagaatcaagtggtgacgacggacccacggctgcagtcaccggaaacgcagctgcggccacgccagctccttcagatccaggacagactgtcgctccccaggaagctgtaccgtcgagtcactcaccccagcctgaggagggtggtggggtgccgactcagtcggcagactcgcgcgcacgctccatgttgggcagggaggtggtcggtgcggtggagccggtccacgatgacgaggcaatgctggagcaagtctcgggggggggggggggagcgcgctcactcgccgagccattctccgcctcgctccccaacgctgagggttaaaatcgctttaacgtacttgacgatttcgacggcgatgccgacctagaagtcgccacagccaacgaggaggacgctgtcatctatcagattctgcctagggtgtctgcagctactaaagcgtgagtccgccaccgcttcatgtcgaagcgcccaaagcactcgtctggttcccaagacctcgacgccgatgaagccatcaccaaagctctgcaggaactcgaggagacatcgctaacagctcaagcggcagtggacgtcgacgtcataggggtggccgaacgccacgtcgaggcggtcaagttggagttatccagggccaaaagcgcggagagtctacttaattcgatagtggcggctcctcatgcctggcaacttgcactccaagcttccgaggtggtcgatcagttcgaagacttcatctcgctacacgctctgaaccggcaattgctccgcctgcctaacgccagctccaagtcgtttacagcacggctcgcgactgtcgatcagttccactctgggtcccgctctcaactcattgcctctatcacagctgcggcagggtcatccgaagaaggtcgcattggctggctccacgcgcgatgtgtcagtctcttcgagctactattgattcttatggctactcacacgtttcgagacgactcgtggctcgccatcttcgcgaccagctccccgtccttcttgaagcgtaaaggactgcgtcttctggcggaagccacgctgcgagatctgatccactccagctacggtcacggaaagccttcttcggctgccaggcctcgccactctactcgagatctctgggttgcaagcttccgccgacacggtctggatggacctgacggtgtcagaggtgaacccagcgacggccgaccaggatatgggccccgaccgcagctaaggtcttgccggactggcataacctcagcgtgctctccgccaatttgaacgggatatctccaactggcacggaagtggcccacctcgcccggcgccatgccattgtgtgtatccaggaatccaagctgcgtgatgcgtctcaagcctcgacgttgcgtttcgtggtggaggcttcggccaagcgcaaagctttcatcaatgacaggaacgaaaatcactcgggctcaagggccactcgtagcggtggcatcgtgacggtcattgaccccagcttacccggtttatcatctgcggaggaacttgttcagcaccgtcgcgagggcagatactcaatcgtacgactggtgatcgggccttcggtggtgtatatccacaacatatatgcccccaatggcagcagggagcgcaataacttcttcgcaacgttacctcggtctttccctgaggatgttgtccacattgcgtgtggcgacttcaacttgacgctgaacccctcgcttgacgcgctacgacccgcgtcagacccgagccaagctgaatgtcaggactggatgactgcctggcactggaggactgttggcggacccatcatccagcggactatgttttctccgggcccacaagggcaaacaggatagactacatcgccgtctcggaggacctctgcactcatcagtacgctgactccgcgtacgtgaacctggacaaaggaggagatcacctcggcgtccagctccagctaaccagttggcatcatccacgcggtctggcttcatggcgagtgctccggtggttactccacaacgaaggtatccgagaggaaattcgtacggcggccgccgagctgctgcgtaacctccctagctctgacaatccaggcgtcctctggtcagcctggaaataccgggtccgtaagtacctccaacgccaatgcagtttcctccgcgcgcgaaatcgtcatgttcacgacgcccttgtccgccgtctggaaaggctgtcgtcgctgcgagcagtggactcctccccagcggtggccatcgcatggtattgtgccaagcgggacgtcgaactcatgttggagggacgtgaagtctacaggagaagctatcgatttgactatttagcgactgcactggagaccaactcgtcggccttctttcgtccaccggagcctgcgcggcgggtaccgctcgatcgcgtcgagcagcaggatgggaccgtatccacggatccggcaaccatctacgagactttccagcagaaatggggctgtatcttcggcgataaacgatttgtcacggactcacaagacgtcgctgtcgacctgtctgctcaggaccagctcgtcaatgcagtggaagatgtgctggcaccagccgaggctctggacctcgacagcgagttcaccacataggaatttacagaggcgatcattttgatgcggagcgacggtgcgccgggccccgacggattaacggcacgcttctatcaaatcgctccagacatctttggggaagttttggctcgggtattcgacggtcagttccagcgcggcactctgttaagccaccagaacctttccgaagtcttcttgctgcacaagaaagggtcgagagcgcgtgtggagaactaccgaccgatatcgttgatgccagtggaggtaaaagtggtctccagggttctcgtcgagcgcttgaagcctctgatgcacaagttggtccatgaggaccagcaaggtttcatccccggtcgctcgctccatcaccacctgttgttgcttttggacctgcaagccttctgccagtccacgggtcaatcggggttcgccgcttttctagacttcgagaaggcttacgaccgagtcgattggaagtacttgcttcgtgtcatggaacgacaagggtttggtccccgcttcctcaagtggatccacattctttactcgaaaccagcttgctccctcatgctggacggctggagccaacccaaattattcccgtctcgtggtgtgaagaagggtgatccgctctcgccgtacttgttcctgctggcaatggtccctctgggagtgatgcttcgtcgtcaaccgggcgttggaatccctctgcctatgcgccgcattgctacaagcctcttcttcgcggatgactcgttgctcctcgcaacgtccatcgagggggtacacgcccaacttcagacagtccaagtctattgcgcgggctccggagccaaattaaatgcctccaagtcaagactgcttccgctgtctggcacctccgccaggataacttcggctccgctgccggtagtcgcagccgatgaacgtgttcgatacctaggcaccgacttcgggtataatgttaacgccgaggccacggagcgggaccttgaccagaagctgagccaagcactgcgacgatggcagtatcgcgcccgcactttcgaatgccgcaaactgatagtgacgacgatggtactctccttgctctggtacaaagcccttcatctcgtcatccgtccgaccacgatccacagatggcagcgcatgatcattgacttcgtcgtttacaagaaagtaccacccgcctcagctcggattcgccttaccaccgcagaattggcagtgactccgacagcgcaaggaggcctcggtgtcccagaactcgccttgttcctcacgcgccacaagatgcgactattccaagagtttgcagcgacggtcgaattgtcgaccacatctacgattccgctctgggcaattctccccctttgggccgcctacggcggtgagatttcacactcgacccgtctcgacgacatattctacctatcggcccgtggtcgtcaacctggccacgtcatgtcatggtggaaatgggcgtggcgccagtggcatgaactagctccacgtatgcaacagccaccgatgcccaacacccttcatcaacgccgtcttctccacgcgccgctgtggtgcagcatcctgccacgcttgcaaatcccatcaagctcacgagaccatttcgaacctctatccgacggactgccgacattccacgccttctgcgatcaactggagcgtctcggttaccggtctctcttcgactttctggaacctattggagccactttctctcttgctgacttcatgcactggtttctcagccgccatgaactgttccggtttcgtgatgccactgtaacggggttacacgagagttacccgaagggttacgaagtgggtacacacggtctaacctaaatcagtaggagaatcagtacatggcttcagagccactgattatgcatatgactagggttcactactagatagtgaaccggatacatttacaccgtaggcggctttgccgcaataaagtgaaatacattcagtttgagatttacactgaagagtctagggttgactcttggagtccgtagggtgtacggactcgtacgttctgggattagaacgggcgatcttaaccctttagctaccaggccgttcctgaggggtccacttggacctcttccagagcctatcaaatcgttgcatttgaatttttaaaccaatcagagggatcacgagaatggccggtttcctttgaaatcaacatccccctcaaatttgatttcccctcgtgttcttaacatggaggacgtcgagagcttcgagagcgtagagagcgtcaagcgcttcgagagcttcgagagcgtcgagcgcgtcgagagcgtcgagcgcgttgagagcgtcgagagcatgtgcggctggtgcggcgcaccggagtgcgactggctgcgctatggtggcgagctcgaggaggcaggaaaccgtctgcagggcaagctggcgcgaaagaggcaccgcaaccgtgctatccgcatatcgctgcgtcgattgtatctctatgctaaaaacggaaacatgaagggggacgccccagcatgcatcactcgacgcctcaaccaactttggccggacaacacgatggtgggtatattacgtgcagcagcgactgcatacggcttgatccacccattctgcttgcgataggcggagccggctgcacgccgtgctctcctgcaacatcgcggggctgtgatggaccgagctgcgcttgcgcgtcggccgcgccacattgcatggtggtgtgctgcacgtcagtcgtactgttgagacgcacaccaccagcatccccgatacacgtccacagcgcctcctcgatgcatggccactgcgccgcaaactgcaccgccttgtagactgctgtcactggcgtcgggatgctcgtcatcagcactgtgttgctcgtcgtcagcgtcgtcgagggtgggatctgcgtgcactaggcggtcccagtcgtcgacgagcgcttcgagtgcaatgtcctcgatgctgtagtcctgttgaagctcgagcgcgtcccaatctccgccaactcctgcttccattgttccgatgtgctcgccggtcgccaaaaacctgaatggcatttataccgttgatatcagcttgttacgaaccgaatccgttggtctggctagcacacgataggggtccgaatggacccctgtccgatacgaggatggctcgtcttatggccagcaacaatttcgtccaatagaaatcgtggatttgcttctcttacgggtccctatggacccgtcggtggtccggtagctaaggggttaagctgagactctgcgagtctgttaagcttcctctgacgcaaagctacggcagccccgctgcacttggtagcacttgtagtcaatccgacacctgagtctgtatagactgaccctctgtggagaatggagcagttcgctcacttgcccccgaaccagcaggatgcgtttataaagcttatgtccttgctgggcccggagggcgtgacgcaacttgcgcagcaatgccctgacgcggtgaacgcgtgtctcgaggcgttttcaagctacgagaatgctcttctagagcacctccagcagaggatggcgactgccgcggcgccccaagcacccccttcgtcgtccgacacgggaacaagacccaagccgctcatgttgagcgtgaagaccttcgaagacaaggagggtgaaagcttgaagctttggacccgtgaggttgagatggctatgagctgagctctactccggacggagtcgcagcgcgtggcaccagctatctcgaagctcggtgggcgagcgagagagtgggcactaacgtccgggacgtcggtcaaggtggccttcccgacgtgggaccagctgaaacagcaattgtcgcgagtgtttgctccgcctaacgaggcgtatcgcgtgcgctcacacttcctggcgaccaggcagagcaagaaggagttgatggactatgtccaagagttgagaactatcattgctggcatgtctgcggaccccctgccggaagcagtcaccgttacggtgttcatagaagggcctccgcactggtattgccaggaaggaggtgttccgaacccacccgagctcttttgaagaggctgtgagcgtcgcattgaatgcggaacacaactttaagtcgtcgagacttgggtggaatgcgtcttacgctagcgcgtcgaatggtgcggaacccatggacctcagctatgctgaagacgaagaagccgagcttcgtgctgctgagcagcgtcgcggtatccgcagatgcttcatctgtggtgacatccgtcaccttcgtgctgggtgtccgctgcgccatcagcgccaggcttcgtcaagccgctcttcgagttcgagccagggctctggtttgtctcggggaaacgagaagtcccagtaggcgcggggcggcctactgcggaagaactaagttctattgagcctcggcgaggtggaggtcgacagaacttagccccgaagagagccgtactctctaacacagaacgtgtatgcaagccgggcttgctagttgtccaagcttgggtgaagggcttcacgaagccatggacgattttgatcgattcgggagcgtcaggtaactacgcccgccgttgtacgatggacggaagcttgctttatgctgaggcggtggtagcgcgcgagagtgacatcgtcaccattcgtctcgcgacgggcactcgtgtcacggtgcctaaggtcctgtggacctgggcgtgaagtttttggattttgatagcgtggaacgctgtctggtcctaggcctcgattcgagatatgatctcatccttggtatggcgtggctggagcgccacgagccttggatcgattggaggtcgaagacccttggtgctacgcacttctctcctggcggagcattgacgagtcatgaacccacctctgctaggaagcagaagcgcttctggcgcgagcactggaccgagtcggtcaatgtgcttgacgtcggagtttccgagttggtggacactgtgtgtgtcgagaaggagcgttccgagagtggctcgcggacggcaggtggagcggcacgaattccgctgagcgggcgtgcgtctgagggcgatgcgacggcgcggtcggcacgatgccgaagaacaaggggctttgcccggatgaagatcgtggagtggtacgtaatccactgagtggaggctgcggatcgtgcagctcttcgctgagtgtcggtaaagacactggagctcccctggagctaaacgaggtggtgactcctggcgtcaagacgcacgcgaaatcacggagctcttcagggcggacggtgtccatgaagaggaggcagcgccgccaagcgctggctgcgagacgcaaggcgtctgcgatctcacgagtcgagaaggccgtgtcgatcggtgaggctccacgcgagagcgagcagctctatacactcgtgaatggagtgacgggcgacgtcgacggaggtatcaacctcgacgacttgccctcgctgtctgctctcctggagctggacgagctgtacttggccgagttcggcgaagccttgaaggctggagacttggctgaggtagtggtaatacgacccgaagaagagttgaacgcgtcctcgcttctggatgaagctgtcctggaagacaccaagaaggcgctgaatgtgcggagcggatcggcgatccttaaggacccgtcggatgccttgtatcgagtggtaaaggattaccaggacgtggtctcgaaggagccgccctcggggctacctccggatcgaggtgttcgacacgaaatcgatctcgttccgggaacgaagtactgcgtgacgaggcagtggcccttgccaaaggagcagtgtgacgtcattgacgcgttcttccgtgcgaagcacgaggcgggcatggtgcgtgagagtaagtctccacactctacgccgacgttctgtgtcagaaagccgaatggcaagtggcgtatcgtgcgtgctttcaacaagctgaatgccgctaccattccggcgcagattcctcggaaggatgttcttcagaacaacatgacaggatgtacgatgtacagtgcgctcgacttggtcgatggatattaccaattgctcatgcagacgagcgacattcctctcactgcggtgagtagcccgagcggcatgctctgggagtggttggtgatgccccaagggctttcaaacgcgccagcgacgtttaagcgtcttgtgacgcagctcttcaggcaccatcgggcgtacgcgcaaacgtacttcgatgacatctttgtccacagtcgtgctgagcacggaaatactgatatggagaagcatgtggagcacctgcgtgctgtgctcaaatgcatgcgtcaaaacaagttgtacgccaacattgacaaatgcatcttcggagcggaagagatccccttcttagggtgcttcattgggaagcgtggcctgagagccgacccggtcaaggtcaaagccattgttgactgaccggttcccaagaaccagaaggatcttcgcaagtggcttggcttggccaattacttgcacaagtacagcgagaactacgctgagatggctcggccactctccaatctcctgaagaaggatgcggagtggtgttgggacaccgagcatcaagatgcgttcgcggctattaaggacagtctccttcattcatgcgactattctggctttgccaaaccccgctcgtccgtttagtgttgtctgtgacgcctcggactttgccatcggctgtgccctgctgcaagcagacgccgaggggcgcgagcgcgaggtggcgttcgaatctcgccagctaaaggctgcggaaaactacttgcaatgaagtatgcgctcgtcaagttcagggttcacctgttgggctctcagccgttcgtgatttacacggatcatgcggcgttacgcactgcgactcagtcgcatctctcgcaaaggataacccgctggctgtccttcttcgcggagtacaacttcgaggtaaagtacaagcctggcaggcagaatgtccttgcagacgcgctgtcgcgcaggccggattacgatctggctcatgtaacgacagtgacgtcgtcattaccggatttgatccgaacggcttatgccaaggacgacatctgtgtcgcgttgctgaaggctctggggagcaaggagtttcaaggctcggacatagaattgtcagcgcgtctgcaccgttattccttcgatggtggcctgttgttctacaacacgggccccgaggatacgccccgcgtggtcatccctcatgatgagtatctgaagtaccgcatcctctatgaggcacacgacacgccactggccggccatcttggccgtgagaagatctacagctcgatgagcacccactactggtgtccgaagctgtacaagtggacgagcacttatgtgcgcacttgcgagacgtgtcagcgagtgaagtcgtcacagcgccgttggcgagtttgcctatccctttgggctgttggcaatccatgagtatggactttgtgtttggcctgcggcgggcaacactggagtcgtggtctacgtggaccgactgagcaagatggctcacattgcggctgtgccggataccatcgatggtaaaggtacagcaacgctgttcttggaccgagtgtttcgacaacacggactccctgagtcgattgtttcggaccgagacccccgcttcacgggtaacttctggagcacggtctttgcggtgcttggcaccaagctggacatgtccacggcggaccatccgcagaccgatggtcagacagagcgcgtaaatcgcgtcgtcgaggacgtgctccacagcatttgcgctgagacgccgaagcgctggagcgccatgctgccactcgttgagtttgcgttgaacaacgccgtgcacacctcgacaggctgcacgccgttctacgtgaacagcttgtctcacccccgcgtcccgctgacaccgccacgtggtggcctcgggcttggtgggggaggggaatccgatttagctgatcggctagccgatgtcagcccggctactgttcgtaaacaggttgacgctttcttgtcgacgcgtctgagtgtcttacgacatgcgcgtgacccaacggctgaaagccaagacaagcaaaaggaacatgcagatgccagaggcagaggcaatgttgaaagttatgaggtcggggacctggtgctgcttaacgctaagaacctacctacacatgcagtttcagccgtcttcaagacgaagttgcgcccgcgcttcatcggacctttcaaggttgtggccaagaagggccttgcgtacacactcaatcttccgaagaagatgcggacgcaccccgtcttctacgtgggcttgctcaagccgtaccaggacccaatgcaggtgcagatggaggcaccgagggtgacgaggtcacaggtgcggaggtcgcggtcgttgaggacgcagtcgccggcgtcgaagacgcgaccatcaacgcgggctccacaggcacaggcgggggtgccgcgggcactgcagaagccgcaagcgcaggaggcgcagcaggcgaggcctgcatgcgggccaggagttcgagctgaccctggagcacagccgggtgccgctgtagctccgcgaactctcgagcgtgtcgctcttcgcgatcgcgaaagtagtccacccacccgttcaagtgaacgaagtcgttctccaaggtcccaagtcggtcccagacctcctgaggaacccctagccactccagccgctcagcgagcctgtcgggatcagtcgcacaacgtgccagacgcgcgtcgatgtcgtagacgtggtcccgaaggcgatccgcctgttgccgagtctcgtgcaactagtcgaacgtcgcgaggcggcttggcgcgtcctccaccggcgctgctcgatgagcatgggaatctgcattaccatgtggagcgcctcctggcgaagcggcggtgccggggtcaaaaccagtatctggtgaaatggcgagggtaccctcactccgagaactcatgggagtttgaggtgcctctccgccaggattgcccagacgtcgtggacgcttttgatcggcttgatcaccagcgccccgagggctcaaggccggcacgccggtcgtcccgcgcttcccggcaataagctggggagctgctgggtcagccacattgctccgaggctgaccctgagccacagcgctcactccctcgcgggaaggagcggctggagtactcgaaggagcgaagtgcgcagtgctaaactgggtctgcggctgggcgagtgccgagaggctgcgcttggctcggaccttcgcgaaatcgaagcggagcttgcgttcaatgcgaacatccacttcactgaagctggctcggagagcatccatggagctgagctttcgactgtgctcggcccaagactcgaactgagcttcgtactcaattgagtcgtcccccgggctaagtaccaccgggtacgtccgcatggcgggcacggacttctgctgggcttccagccgcagcctctcgcgattctccgcgacagtcgtagactgtggagtgaggagtcgctctcgcagagatgtacgcagtgcgagctcctccggagtatgggccgcgggcccaatggcgtgcagcgcgagagactgctggaacgcctggcgacaagcctccgcggagtcgcgaggccggaagccgtagtcggtagtgctggggttcagcagaggccgcagctcggggcgctgggagcgcataggagccatctgcgccgcaacccgctcggactgagcttcgtccaaagggttggagatgacgggacccaggggcacgtccttaccacgaggcgacgaataccgtggctcagtgagcgcgcgcagctcgtagagaccggaagagcgttcagagaacgggtttggagttcgcaacggtagccgtggctgctccctcgacggcgcagcgcgctctgcaggtggacggctcggcgagcgcacaggagacgtgcgcgcggggcgctcttggtcgccacggctcagagagccaactggggccggcaagccttcttcacggcgtatcgacggcgtgggcgaagcgtcgccgcggctcggggagcgtcgcgtggctggggacacatctcctcggttcggagaacccagcatggactcgtccacctcgccctcttcaccaaagagttccctaggatccatgatctggtgggttgatgctcgaggggagctggggcttgcgcgctgcgagctgtgctcctggcggtgcgccgcgaagtactcagataccgagagcctggaaggcgtcgtgggtgtgcgcgtgggcgctgacgttcgcggacgtgcagaggcacaagaggagcgaggctccgaggcagatctcgcgagaggctgtctgtggtcgaaagaccaaaaggctttatgacttgaagtcatgtgagggcgcgttgcgccgagaagttctcagagacgtccacgcgatgtaaattgactcgttcgagaaggaggcttgacggaacaacacccggcggttgaccgttaagcgtgaacacccgtgtccacggtttggtgggggacggtgtaacggggttacacgagagttacccgaagggttacgaagtaggtacacactgtctaacctaaatcagtaggagaatcagtacatggcttcagagccactgattatgcatatgactagggttcactactagatagtgaaccggatacatttacatcataggcggctttgccgcaataaagggaaatacattcagtttgagatttacactgaagagtctagggttgactcttggagtccgtagggtgtacgaactcgtacgttctggtattagaacgggcgatcttaagctgagactctgcgagtctgttaagcttcctctgacgcaaagctacggcagccccgctgcacccacgctttgttgatgagagtctttcagagactgtccgtggtgatccacgccattacaaccagcagcggtggtctactcgtcgttctccaacgtccagactcagtcgccggtctactcggcgtcacgacacaatcacgcgttcggttctttcctcatctccgcaagcaagattggaccgcgctcctccgtcctccgacctcggcatgggagtctcgagccaaacgccttcattgtgaagttagcgcgctcaatggtcactccaaccgactggcgctagtcaagcgatggatgctgcctacctacgacatccagtttcgggtgctccatgagctgatgcacgtgaacatcaagcgtttctttctccaaaccggacgccgcgacccgaccacctgccccagacaagattgctaccagcgcgagagtctggcccactgcttttggctctgctcaccaactcagcagacgtggtctgcactacgtccaatatggtccccgctactccgttgcacgccttcctggttgggctttctcctcgggacctcggagctgcttcactcgagctgggcagcgcaccacaaactggcatacggcttgtggctgatactccgcggcatttgcatgcgatccacctggatcaaccgaaccaacgacgctttcggtcgggaagcagctagccccaaggccattgctgccggcgtcaagtcctctttcgttgtccatttgcgctcgcttgaccgtcgacgccacaggatcaaggtcgacacagccactatgtactccttcatccagcaccttgtctccggccctgaggatgacgagccgctgcgctgatactccacgccccagagtgccgccctgggtcgcccatcgttaagttgcatatttccgtacttagtcaaatcagcatcaaacgaggtccacccgtaattgaactcatttcaagtcaagtcaagtaacacgacaaggggctagggtaaaccctgcggaaggatcattaccacacctaaaaaacaaaagcccccccctcgtgtagtagtaaaagcaccgcccgtcgatctcgtggtcgcgggttcaagtcccgcaagggacaatactttcttgtgagtcttacaaatccccagggacccggggatttgataagcaggatgagttctattacgatccgttttcgaccaatcaagcgcacatctctcccggcggaagttatttgcagtagtttgatcacccaatcacccaatcagctagtagcaaaccaaacacgcactaaccaaaatcaatggcaaagcggcccggtaaaaggaaagggaacaaccgcaataccaaccaaccaaccacggcaagtagacggccatcttggaccgaaagcaccgtatcccgtctgctctgcgaagttaagccgaaccgacctcagcgggccagtggtgtcaccctgacgctgagaccgggaggcacaggtatcgataccgccgagcgcggactttcacctgaagccggagatttgcataagcggacgtgcagccgtaacccactataggacggtgtgctctgccaacccgcacccaatgtggtggtggatagttgagtgagctggaggcctcgtgcataaaaaagccccatagtgtaatgaggggtacggaacccggtcccccccgggggtcggatagctaccagcatgctacgccatagacggccccagtcatggtgtacgggttccggtggcttaaatctctgcgaagttaagcagaaccgatcccaatcggtgtagtggtaagagccgcacatcggggactgggaggatgagcgttcgagtcccccagggcgtaggacttttagccagggtagcgcggggtcgatagtgtaatgaacagaaccctgcagcacacattgacatgggttacaccacccaaaagggaaggttattaaatatctctgcgaagttaagcagcctcaagctcgggtagtactcgggtgggggaccactgtggaagtctgggtgctgtacgtcggctatctcgaccctcccagccccgacgccaacttgttggggattgcaggatcgacacgcttccgcttcttcccacacctccgtaaggacgactgcacttcggtgcttcgtccatccacctcgatttgacctgctcgcgcctcaacactgaaatgcgtcactgccacattggaagaccactcgaacctcctcttccgaagccgccgtctgtccattccatcctgctacgacgtccaattccgcgtcctccacgaactccttccggtgaatgccaagcgatttttcctccaatgcggacgtcatgaccccaccctttgtccccaaccaagctgccatcacgttgaaagtattgagcactgcttttggcggtgctccatggtgcggcaaccgtggtcgctactgccgccgcgatggagtttactactgcagcgctcgccttcccggcacgacttcctcctgggtgacgaggagattctccacgatcatctacagcttttggctgatccttcgcggtaccttcatacgcgcagtgtggcttaaccgcaaccgtgtcgctttcgaccgtccagctttggcagttcgggcggtcgcagcaggagttcggccgctctttatcgctcatctgcgttcgctgcgtcggcgccaccgcaagctcaagatcgacttcgagttgcttcgccaggtcctcgagtctcttgtatccgcgtctgctggtcgactgcctgctaacctggcaggcatagatctggccgtaccccaacggacgtaatggacaccacataaccctaagccccttcgtactaaagtttgactcgcagaaagacgaagtccaatcgtaatagaactcaaatcagtcagtcagtcataccacgacaatgcacgttttcacactgtgcacttttgctgcatgtacattcgatagcataagctattgtgcctttcacttattctgccgtgataattctggcatcactctaatcccttatcgaccttaattatgccccgagttagctacatcccatgttaattccgggtcgtccctccgtggccgaattaggagcggcgacagtgaggtcgagtcaagacggaataagctaatctagatgatgatgaggtatattggacaactggataacttccgagtcctaacaaccctactgacgcctcggccgaatctcactacttacgtcttcttttgctgtttttccgggtctgccagcagaacctgcgcgtctccccttctattaggccattccacgaggccttcttgcgcatgctcggaataagctaatcaagcctgcgttagagcatctacaccggtcaacaactttttggcaataccgaataggaaatgtcgtatccagcaaaatgtcatatccgacagtggaatatatccaatcagaatccagtatttgatcagtacataatcactccaaatgcaattgttgcatccgacaccaatctggtgctcattaattcgcagctagtatccatagcaacatggtaggaagcgctgtttttcataacagacgatgggaggtggccgtggagcaatattcaagcaaggcaacgcgctacaatatcaaaattctcctatgtatcctttcatttacgttctcgtttgtgattatcatgtttgcgaggtagacttcgtacttagtatttgactgctggatacgacaattgctatacggtaacgatttttgtcaaaacttttgcgagaaaaggttcaataggttttacaccgggtcaacaaaattttggcaattcgttggcaattcttgttggggccaatctggacaaaaccaccgacataattgctggactttttgttggtggcaaagcgccaagaggatcatttatgcaaaatggtgtgcaaacacactaacgatcactggtccggcggaagacgtagagcgccacgttcgcggcaatagcgcccttgtagcgcaagttctgtagtgctgctgtgtcttaccactttccctagactatgatatacatggagaatgctgttaatcatcacagtttggtgtgtggggctcaaaatggcttgctatgtgctgtcccggggtcgggcagcacttttggtggagtttttgttgctggagttgtgtaggtgactggtgttgctgtcgtcgaaatatgtaggaaaagtacagaaaatctaggcaaacccgtaggctttgccgtttgctttgcccaaaaaacaccaacatcggtggagatgaccgtaggcagaaacagagcgattggcaggttcctacccgccaattcatgccattctgctcgtatctccgtcggttggctctcagatgctgatcgcaggtggtaggggaagcgctcataatcttaggcttaattagcactattaaataaatatgcgttgatcgcccttttatgactctaattccgcctgaattattaataacagctcacctgcaaaaataagtgacatgcacaatacatgctaaaataatatgggctcgaacctcggggaatctcaatccattcaaggtcgcaagcgaccacattttggttgaactatgccggcatactttacgaacatctagtcaaagcatcctctaacctacggatagttcttagtgatacaagattgggctttatcactatctagagaccgttaactatggggatgtagctagttccccaaccaccaggccaaatccactgcacgtcggctggttcagcagcgagagagagtagtgcgtccgcctaggtagcccgatggaaggaacgagagagatcgaagtgcgaggcagatacgtcaacactgccagacagctactggccgtcggaccagacgtccttcggataggaacggtggggaggacacattatcggcgaccgtcacccccggataggttttttgggctgtggtaatccgtatttctctatctacttcgagctcaagacctcaatcccgagtgcggcgaccgaactcatttgctcttacgatgatgacaggcttcgcactttctgccacgatctctgtggtctctagccacagtccccaccaccctactgtgttacgccctcatcatacaccgatcaccctaatctctgcctcacattagctttactggaacccgcgtacggcgccactctcttgctgtattaaatcttaactgatcaccaactgggaacaatctcaactgagggtcgagcggctagctgcacgctctttaccccccgttacgaagcctcctaccccctacctacgagagagccctttctaacctatcttgctgtctctcagccgcaagccactcactctgtcgtcgcctctcctttctgcatactccttgtttcttgctctcctccgtgtctgccctccctcgatctttgtatggccgacttctggccttgaagtggcaggataccaccagcgaccggtgcctccagcccactggctcacctcctccaccatccagctgccaccgccacactccgtgcccgtcctgcgatgcatatgtgagtggatgtgcagattaggcgatcgttttatgaaagccaagttgatatagccgcgtttggagcagaatgcctactttttactaggcaatcgcgcagccaagcgatgcatctagatcacgatcgctttcagccctgatttgtactcgattaatttaggggttgagatctaataaggggttgctagagatggcggttctcacaatacactgtaccttaaacaatattgcaatgtggtgcaaatctagatagtgatgcctctggatagtgataaaaagnnnnnnnnnnnnnnnnnnnnnnnnnnnnnnnnnnnnnnnnnnnnnnnnnnnnnnnnnnnnnnnnnnnnnnnnnnnnnnnnnnnnnnnnnnnnnnnnnnnngcgagcttggaacgtagtcaaagttcacatcctgtcataggctaatgctcctacttgcatccagttaggcgaaaggtcgcctaacttttgcctgattggatccagcgagcttggaaacgtagtcaaagttcacatcctgtcataggcgaaaggtcgcctaaccaatcaggtgaccctcgtctcattcaaaaagatgtcaactcgtactcgctggagccccgtgctttagcgcagttcgcactacagcactagatggtcgctgcaccgccacttgctgtaatcttcctccgtgtagagccaattcaggacgacctgcagagatgacttgccgtcggtgaccgcatcgtggccttagaagaccgacttcttcttggtcttcgcgcttagtttgcttgccgcgacgagatgttcgtgttgttattttgtgtgtcgcacactccttggactccaagtaatctcctgaaaaaaaactggggtaagatctcttgtaatgcagggtaattttgtccaataagatgatgagattcttcttggaaagcggcttgcatccaactctggcaaccactagtatcacagtgtatgaaaaagacggtcgacatacagacacgtctcacgacatatcaggcttctataggtcagtgaattaagctcagatagaaggccagtttaccaccatattacagtgtatgaacaaacgtggaaggacatgatgtgagtatagctaaagcgggtgaggagcacctactacatggcgaagaattagtcatcccgcgctggactcttggtggcggcttgaaaacgcatgcgattgatcggagatcaacgacgtacacggtctctaaagatgtactttcaagcagcatcgtgagtcgtacataagcggaggaggagacgactcaggcaacatgcaggtagtttatgaattttcttggtaactatggtaagcgacactgtacctcatcacctactttaaatatggtacctctattctgccttgcatttattttacccttcgttttgacctcggatatcgtagtggtcggaaaagataaatccgagcttggtaggggtaggtttgaataactatggtttatctaattccgtttttggaggggttggggtgacgtcctccccctaacagcatgatgctggtctcgggcttccggcaggtgctctcgggcatctgcgagtcctttgcgggtctcagcctccgctcaccagcagtcaccgctgtcaaacccctcctccatctcgtcctaaccaaactaagcgcctccgtgtaggcacgtttaatgtccagtcgctcaactcgcaccgcaggcaatatggcacactaccacgagatctccagcgctacaaactcgacattcttggcctccaagagaccaagatacccacactcggtcggaagctcatcggtgaacactctactaactctacccgctttacaggaaaaccacggcgtcggctttgcctcctcagcacgcctgcgaccattcctgtggcgctattgggctcactgtgaccgcatcggcgtcctccaactggtactgctccatacaggccgtgtcaacatcgtctctgcatatgcgccccacagcggtcggcccctccaggatgtcgatcgtttctacatggacctacatgactctctaacgtccattccaagccgcgatatcacgatccttactggagacttcaacgccaaactaggccggagacaaagcggcgaatccttcctggggccacacgcacgaggagtgcgcaaccgcaacggccatgctctagctaacttttgtgattcttttcgtctctttgccactaacacagcattccaaaaacgcgcgaagcacaagaccacttggagccaacgcaggaccgatgtctgcatctacaatcagatcgattatattttctgtccacagaactgcaggcacttttgcatggacgctcaatcctggggtggaaccaacacaccgtccaaccataaactcgttacggcggacttcgtgcttcaacactctcagagactacgattcaagccccatcagcgcaccgaacgccccctccgactcgcacgtgaccagctcatccacgacgaagagacccgagccaagtacagcactgcgctgcagcacgcccttgccaacaacaaggacgccgacacactctccatccccatgcagtggaaaacgaccctcgacctagtcaagcagacagccgaaacgacagtcgacttcagctccccgcccaacgacaccacagatacgacgatgccgttctccgagagctctcggcccgccaacgagctctccagctacgcatctacaatgatcgcagcacaagcacaagcgctctccgccgagaacgcaacgcaatcttacatcagatcaagtatcggtgtcgtgacctcgctaaccaggaactcgacgaaagaatctgccagatcgaaagcctcagcgacacagctcagttttacgaagctgtgcgcgcaatcaaaccgagacaaaccgatctgctactgctgcgagactttacaggtaagtatatacttcgccaggctacgactaacacccgtgttcactcacactttcagacccagtttgccatacctacgcgatcacccatcgctcttgaccatgaagcccgcgcattcgactgccccatcacggccgacgaggtccgccaagcgctacgtcaactaaataaccgccgagcgtctggccccgacgacattccagccgagctcctcaaatatggagctgatgagctggctccgcgccttgctactctgctgaacaaaagttttgaacgtggggaacctcttgacctcggggcaggcacgctgctgtgcctccctaagccgaacaaaccgcgcggagcatgctcaagtctccgcccaatcgtcctcctaaacagcatcaggaaagctgtctcgctggttgcactccggcggatgtccccagcagtagatcgctttctgtcgcccaaccagagcggcttcagaaataaccgcaacaccgctgacgcggtatggacacattgatggctttgtgcctgggcccaacgctaccaagagaatattcacgtccttggcatcgacctctccagggcattcgacactatcgaccggcagcggcttctctcggttctggagaccttcctgacccgtgatgacgtccgacttatccagacgctcctgactaacaccacgctggcacttcgagcagggtccaaaacgctcgctccattcgagagtaatacgggcacccctcagggcgactcactctcgccgatcttatttgtagtttacttagaggcagctcttagagatgttgctagaggactagatgtcccattccagctcctggagcaaatggtggtttacgcagacgacgcagacttcatctgccgcgactcggcagtggtcgacctcatcctcgagcgcgcaccggcgatcctcgcgcgatggtcgctccagatgaatgtttccaagaccgagcttacaaggattcaacggcacgtctggccagcaggcgaaaccagacacacccgagccgcggaggagacatggcgatcaactaaaaagctcggatcactactcggcgatgctgaagatatcaacagacgaaagacactggcaacagcggctctcaatcggctctgggcggtgtggctgcggctgcacgtcacgacggacaagaccaggattcgcctctacaactgctacgtgttgccggtactactctacaacagcgggacctgggctctgacgcagtcagagctccacagcctggagagctttcaccgtcggcagctacgcaacgtactcaacatccgctaccctcgccacgtctccaatcaaggcctctacgagatctgcaacgagcggccgctccgacaccggatcatggcgtccaggtggggcctctttggccacatcctgcggcgccctgagatcccggtgtacgttcaaatggcggcctactttgctccaagcgatgcagctaagtggcgcggccgaccgcgcacaacgttgcctctagtactggacgcagacctcgtttcaagtggctccggacaccgactgcgctgcgcgcgcgatcttgacaaacttcgacaactagcactggacaagacaagatggaagacactcatgacatcaatcctcgactcgctgcctgcagcgggagacccgacatatgcggacaccactctatgccgccgactagcaaaattgagtctagcgcaggcataacttcggctacgcgaaaatgtatctcatttcatttcatatctaattccgaccacttcgttggctgcgagcacacgagcatccatttgcgctcctctcactgcacccagctttctaagctccctgaacctgcctacttactgctagatgctaccgacaagcgatgatgctgcttgtgtgtttgctacagattgctgtagggacaggatgctttaaaagcgacgacgcagtgagccttacgtaggcgcgttcctgtcaccggcagggtagtgtctgagggccacccggtaagtatgtctggtaagtatgacttcgacgagggcaaggacatggaggatgccgagcccacgggcctgcacgtgcgcatcaagaacgcccagagcgcgcggcggccttcgaggcgctggagcagatgctggcgctgcagagcgagcagacggactggaccttcaaggtgttcaagtgcatcgtcaagctcactgttgccgtcgccgccgctctcgtagtcaccgctgctcttggccagcgtcccgtaggtcgcggcggcctccgtaaagctgctgttctagcgacggcacgacgaggcctgcgccactaggaggagctgctgggctacgccaaaacggcgaacaaaacgtcgtccaggagcgctaccaagagttgcggtctacgagcacgaacgcacctggaatggcgtacaaagagaacaaggtgtcggacaagagtggcgtgggctttgcgggcttggtggggtggcagtcgacacgcagcggctggtggacctgccccggcgcgaccaggccaaggtacttgtagccgtatctgctaagctagtagtagtacaatagaaagcgatgcacagtagggagttccttgaacaagattatgtggtatttgtccatttatcttacattcttctgcatacgtctctactgtccgcatgattggacttggtctctagctcatcgatgacagacagcgttgcgtaaataaaaattgcaataaaactattgataaaattggggtcaaaaattacaattagaaaattggctgcaatgattttattgtattgtacaagacagttgacttgataactgtatgtgcgtgggtagccaatcaaatggtccatacagactcctatacaaggcacaagaatacaattcaatgcctacattgtacaattaaaattgtagcgtgacggcaaatctcaatcaatttttgaatgtgacgcaacgctgctgccgaaaccagagctgaagctagcggcgccagcccggcaaatgctccttacaataatagtgttctggtgtgtgtggtagcaccagagcccaacgagtgagtcatccgatttagcgcgacagcacgagggcagcatccgacatatcgggagggcggtcgttttggccgatttaaaatggcaattccgacctgcttgatcagctcgaccgaggtttaacaagcttaatctaccttcacctggagtccctcggctttatctctgagctgcaaattatatcagacccgatacatcctacttctgagcatcggaattgccaaaatttttgcaaggcacaatatatacctataatataggtatatattgtgccttgcaaaatgtttaaagatatattatatcttttgccaaataaattaccggatgtttagacctccacctggatcctcccatagctctgaattaaatttcagagaatacgaaccttggctgagatctgtttgctgcatgtagattttttcttcttgaatatgcaaatgcctatctctaatgctattacagttcgcctcaatcgttctctttacttcaattcgttcatccgtaccctgctcaatacgatttggtctgcgatagcgcagctctaacgttgattcctatcccagtgctagggcttcgcgaaggctgggataggtacatgataacataggttagaattatgaaattcacctcatcgggtgcgcttattcgtcgattgtgcagtggaagccttccaaaaccgtattaaacttctgcataaacggatttaagaaaacttattctgatgagacgtaaattacgtctgaataaacgaagggtcacgtcgcccccctcattgtgcaactacgtaaattttaacttgattaaagtatacacatccctcatttagcaacttgaaggcataaagcccgacctctcacatatatcgacctctgcacagtttatatgtagatatgaatttagagaaacattttatgtcgatgaaatgcaggttttggaaggctcccagtagacggagcccctaattgaaaagcaagcctgcataacagatacagacgatcccctcggtagtaatccctaggtgaggaatacccgctcatcaggaatataaaggcgggtgccaacgatttctgaatgaccgtgccaagtgaaacaattggcgggaacccgcgttcccgcaaatgataccgaccaaatcgcgaattatttatttaatttttggcctccatattggtaccctctgggcaagttaaaccctcatatctaagtgctgtcgatgaaggactactctcaaaatatgccaccggtactgaaaagacccaaataacataccttaccatgtccaagtttatctttcatgagcaggaggatagcgatgagaccgggaagcactgtaccgctgcaccaggcaagcgactggattttcgtggagagacacaggacgagggcgaaggtaaattaacctttcgttcccctactgagctttagctgcgttctatgtaggtcatagaccaacacttcaatgcatttgctcatacatgtgtaccggtagttttgggggaaccggggtcccgatgggtacccgggttcccgccaattgtttcaagtacccctcacccctcaatagtcataagtaatagaaaatcacggaatatgaatgttctggggtgcttaactatcggaaaaattccactttgtacaggacgtctggagtagtctaaccagcagctcctattgtccatgttttcttatcgtatttcatatcgtatttaacgatcgcattagctttgagagccggcttttagacctgctagtgctgttcgtttgaatagaatggagcttgggtgcttgtcagcattatcgagatggggctcaataatatcatggcaaattattttgctctcagtatgattacctacatcataccccacatctcttatggtattatatcaaatatactttatccttttcggtgttaccgaggtatatttcgttatctgcacgaatcccatccatgcccgctcatcggtttgagcagcctttttagggctgtgcagacagaagacttaagcacttcgtcgcttcctatcccagtataaggtacgattataatataaatacatgtaatacgtggtgaatgacaatactgtacagtacttcgaaatacatgtagaaatttacgactcctttttgcttttgcccaacgaagagtgcgatccacaagatagcacatcactagtttatatcccatccgttttggactggcactgtattcctgagcaaggtcgccgggtagcacgcttagctaggctactcacaacatgaccttccacgtgtgtccattcaataggcacttcgggtttgagttaatgctgctgcgccagccgccctgcttgacgctgcgcttaggggcattgcaccgtgcaaattgcgcgcaagattacctcgttaggggggtattttgtatgtccttttattatcaagcgacgattttcttaaggttgatgctttgtccatttccctggatccaagcaaagcccgcccggcttcttcaagttccctactacgaactattatacctactgtactgtagtactgtacaccgacggacagaatgcaacagccagcgggaaacgactggtcactgtacgccttataaacagccgtttcaatacagattcatgattagttcaaataggttatgggatgattttcttagtgagactaagtcttggatttgtgtggtgttacactaccagaaacaaaattcggatttttattggctaaaacagtaatctactgtgaaacaaacagtgcaaggtgtctacccttatgtacaagagtacctcgtctatttccaagcgggttttcgtccatacaacattacctggtatgtttgtgttgatcgacatacatgtattaatacatgtattcccctctcgaatcctatcgaaacctggtgccattacagataacgatggaaaaatacgctccaccaaaaaattcgccatgcgacaagtcccgacttctgatccgatacaaaacaatgtttgtattttagccaatcagacgaacacgagctcgtatgtcttaccaaccattactacaaaaaattactggcacggagagcaccgcgaagcatggcatggaaagtgttcgctgtggtggacccgttgccagcgaacaccacgtccacttgccagcccctcgacgtaagcgtgatgggcccgctgaagtcggccctgcgcagtacatgggcttactgcaaaagccccaaaacggcaaaagaaaagcgccttgatattatcgagcgcactatcatagcctagaacagccttgatgaggacattgtagttgagagttttgaaaaggcgcttcctcagcactttgaagctctggaattcttgtagtcacaacaatacactccaccttttctttgtcacgaccgtaacttccatgtcgtctttttctacattattgacctttctctaggatttcgacctcacttttgaccaatcagctcaactggcgtatattttggaggatagtggtcagtgctggcgtatttttccgtggtcatctgtactgggggggggggtcgtctgtactgtaccatgcattacatcgcgacttgtttactgcaaaatgagccagcttgcaagagcgttttgctggttttttgtggcatttgcatggagcgtctgctttcaaagcgcgctttgtactgttcgtgaatcgcgtttcccaaggtgggcgggcatcgcatcggccgctcttcacttcctaactcacattctgttattcgccctccagcccacaggtgcttactttccgcgattccaggaatcgaattgaccatgcgactgccctccatcctcttggcagtgtctgcgctcacggttctcgcgagcgatagcgctctcgctgccgtcgcgggtgccagcgaggacgcgaaggtctccacgatggcctccacgatggcgtccccggacctcgacgtgctagctgtgagccacagcgccacgagatttctgcgcggcctcgaaagcgtgggtgaagtcgacgaagatagattggccggtgataaactgttccacgctgcgaagctcaagagagcgatggatgactccaagtacgctgagactctgatgaagaggtggaagcgtcacggttacgacattgaaaaagcaaaaagcatactggacgtctcccgatacgcgaagaacgagaaactcaacgctatctacctcaaatacgctgcttggctcgatacgcacttctcacgcctcccaggtgtcaaaccttcgggtggagacgacctgttcaacaaggcaaagctcgaagtggcgatcaaagatggcaactacaagaggacgttgttcaaggagtggaagacccacaactacgaaagcgaggctgtgttcaaacagctgaatgctttgggccgaaaggatttcgacaacaccttggacaggttatacgtggactacgtgatctggctcaacgtccacttcccgcatccggacacactcaagctggcgaatgagccgctgttgttcaaggagtcgatgctcctcaaagcgaggactgacgtcgactacgctcagtctctgttctgggcgtggaaaaagaatttcagcctcgagaaggtcaccgagaatctaaagttaacgtttgccaatgccgacaacaaggtcctgcgcggatacaccaactggctcatcaataatttccattgaaggcgaaaaccactcgttcgtaaagtacgtattagtacgtacaagcggctactgacagatagtttggttgattttaccccgcgtgaaaaaaaagtaacattcacttggctacagtatgcgcatcctgccggtacctatatccaagtctctctcatattacttaagtactagtactacgttcatgagccgaggccgtatatttgcttgcagctcaccccttaacgttattgccggtgtcccatacacctgcggcatgccgtatttggtcctggtccagcgcgactctgatcctcaagcccattcacacattattctcgaacctcgcgagttgctctctcatgccatttccaccaggatgtgcattgtggtgcatccacctggcatttgttggccatcgacgtcgtggttctcgctccgcgtccagagaaaaacacaccaacctggagacgtgagatggcgtacaccgcccaaaaagctctggaatctagaattgtcattgtttgttaaagaatacttagtatagtattgtttcacagcaatcaaagcagccaggacaactcctgcgccagcctcgcagccacaacatccgtaaatgatgtcgaatccagccgtacaccacgccattatattataatattttaatagtattaaaatacacaacgcggtggattaccttctacagtagatctcattgcgaactctcagtgcgaacaaggtatacagctgtactagtagaccacaaatgatgctagagcgtttgacttatcgtcgccatttggctgaactactttcagttttgtttggacacatccttggtccttaaaaagccccgtgccgcgtgtcaattgaccgtctgtagctgacgattcggcgggcctcctcgctgaaagcgatggtctgctgacagaggcgctgtttccgtagctgggtgtgacctcgtttcatgcgaaagtcttagcgcccgttgccttttcgaccgaagacatctcagcaagcctttttacgacgtccggcttgatgtcaggcgttgtgctcttgtcggttttgaagcgggttgatcgcgacaaaagaagaatgtatttctcctcatcgccacagcactaagactgggtcactcgtcaatactgacaaagccgaccaataaaggagacagatttcgctgcaaacagtttgatggtcttcaaacttgaccgcaacttgactatcaataatttgttttcatctacagctcggaaaagaaaattatataattattttcgcctgtgctttacgtcgactcaatcgttcttctgctggtgagattagcggaatgtggtgccggggggcgagtatgaagccactcccgagtgactggggtagtctttgaatacctcatcggtatgttcggcgtgaccatttcaagagtgacccgttcgaacccatgcaggcccacctgcagaacacagtggcgcaggccaaccacgagctgctgaacaagaccaacgctgccgcggcgaagagagccggaggtaacaacaagatggaagtcgaatcttgaggcccaggcgcagggatatcgacttgtaagcatgtttgaacggattacaagtatggcagtgtgctggtgtgttaggagctcgggtagactttgttttggaacaccggtgggtctggtccgtgctgggtcttcaggacccgatacagagatcttccaggaagttacatatttgttttgggtggatctcaagaatagatcacgtacttctctggcccacataagaaacaacgcttcggttttctggacataactttaatgttccccgctgctttaatggcgccatcccagtcaactgtctcagtcgagtacgtttgggatctcgtcaacttcggcgacgcagctttctcatccggaaatgacttagaccttgtcagtttgtcggccttcggagaagacgggtaggttccggtcaaatcaaccggcgccttcttttttccggtcagtattgacagaaactccagcagcttctcgtagtaggccttcgaaaaagcgttcgctctctcttcgtagttactgctccgatggccgaccacgctggctctcaagagcctgccactctccaaagcagcaccggtcgagctcacaaagtgtgaggaagccgtcttgggggttggagactttgcagtactggaggaagagacgacaatgcagcagacaatgaaagcgatagtcgcagcgagcataaaagagctgaaccgcatgactcgaagttgtacatacatgtatatttagagagaccgaaaacgcatcagcagtaccttgcatcgcgttatgccgcttatccctgcgccggagaagaacaagtcgccagctcatatggaggctggctagtttcggataatgttttgctgatggcgcactgccagcacatgtagtttaaactcagcgactgtgttttatcaatccattagtcaaacctcaactcgtacgcccttttaaatgtgttggtttttaggttgtggttgagggggcaaattccaaagtgagattaaatgttatcgtctctcaaactactctctagtcttcccctcctgctttccttcttgttctccttgtgctcgttggtgcctctcatcagacggattactcccgggttccgattgacttgatctcagtatacttgggtctccctgaccagccaatggtatatccagagcccggctgccgccggcattcccgtcgccgtcggatcctccgagtcatcggcggatgtgtccacacgttctcctcgtccatgtgcatctattggcggcgctcccgaagactcatgaacaaaatgcctttagttgtatcgaagaggggcactgtacatactatagcgaagaggcaatgcagttttaactctttaaaataatatagagctcgggagagatctttacgctgttacagcgtcgctgtatgaattgtgctcgcaaaaaggcccacgcaactcactcgtgcatagagctattttaatagctattaatagctattaaaatagcaggtttggtgcgatcggggcactcaatgtctgcgtaatgcgctatcacaaagcaaacatacctaccagatataggcgacccgaagcgaatgctccgggggagtacacaggtcgaattagtcaaaagtacacctctgaaactggtatttaccagcaataatggctcgatctcagcgaaacatgttcaaatcgcaagtaagttttgtatgcgagcccgacttggagccatttctgataataaggcttcagaaatcaattgatgaaaatgacagtagcaagatacgttgttggcaagaatgattgccgtttgaagatattttggccaacgcatgcttattatctcgttaataatctcgattttaatccagccagctcttaattaagacctaggtctgatttatatatctcgccagtacggtctaagatccgagcttggggctctgttttctcaaccaaggcgcttttctacgacttggaaacgcagaaatgccattctagacgggccaaaccgagtttctgggcctaaaagcggccccccagcaaagcataaagctaaatcagccctcgcctatctcgtgtccactcatatttacccctcattccccgtgctcatctccgtggaagcaagattgtttgcttgtcggaggctcatacatactcgtatatcgatttttgtatgaatctgcataaaacagatcattgtatcattttttgtcgtttcagctgacatacctcctacatgcacctccgacattgtggcaagaataacacctaagcgttcatgaaacatgtcggatgctgctacaagcaatatctcgcgggttttctatattcagtaaattatagggataggtaacaaggtgtgtggcttcgtagccagtttttgcgaatccagtgcgaatcctcccccctgtcgtcctgcacgccatcgtctcgccccccccccccccccaccccacccgcgcgcctccccactacctccccctcccgcgtgtcgttcaagcaatgggatcatctaaagcgagctcccccaccggagatcgtgacgccgaggttgctaaactacgagagagagtgaatgacctcgaacgcgagcgcgagcgcctgatacattcgacgaggaaggctgagaacatggccgacaaaaattacctgctcactcagcagtatttcagcatgatcaagaacaaagaggacaagaacgacaagcaagacaccgaggtagctcagctgcttcgagaggcaaaggcgaaggctgagagagcagaggagaatgcgaacgtgcaagtccgaaacctgcaagccaagctggatgagatgtccaagcgtgctctggaggcagagaatgctctcaaagacgagaaacaccagcgcgagaccgacgggattcgattcagggcagaagtggacaagaacagtgagcgtgtcaaggaaaaccagatgctcaaagagaggttccaaaaagctattgagacgatcacgacgttgcagaaggagctcaagcaagtgcgtgctgcgactcaagcttcgagagagcgggaaactaatctgatacagctactgcaagacatgaactcgctggtcgcaggcatcgtctcgaactcgcatgaaatgagcaatcgactgacaagttgctgcagcagtcttggtgagctgttgggcattgttggtagggcaaacgttgcggtatcgactgcactagtcgcttcgcaacaaggagtgcgatttgtgatatcggagctgggagactcggctcaattgaagcttttaccaggtactttcgaaggtacactaggccagatgaaggaagagggttgccgtggcccgactcggtttctcgctggggctgacctggacaaggtacggcatcaagtgaaagagtcgggaaagctcgtggtgaagaggagtctcgagaatcaggtaagtctctgatctattactacgttgaatatgtggcaatgacaatattatagattgatgttgatgtttcactagggccaagaagcgacggaaagtgctatcctccgatggcgcgagttctatgaagactttgtgtggacgccggcgactacaattatcagtcgaaacaagtcacgcagttcttcttcagtatcgtcacggccactggagaagatcgactctgccgtcatctgaagcgtcttcacctggatgtgtcagcagaggctgaagttgtcgggaaccagctcgaactggcgcaggagtctcacgaagcctgtgagagctacgtggaagtgtggaaaggatactacaacaagtgggtggctgatcaagcagaactcgcggtcagcgtgacagaagcggtagacgaactatccgcccaaaacctcccgaaatcgtaagtcaaggacccatttgctgtcatgacgccttctggtacggttgtggagggagaatagcgtcatgtcgtccgctagcatcctgcgcaggacattaaagtcgtaaagctaaatcaaataaatcgtttacaactaaagatgtcgttgttgtattatacaactgatctgagtgacgagggacctagagccccacgacacaagcttcctttaccgcctccccaacagtgaacctctctctgttcaagcagcagaacggggaacatgactttggcgtttccatagtgagctcgattgtgttgagtaatatttgaagctgcgtactacactgcgcagcttatgctggtaagcacacatcaaacacgttggctaggacggtgttgaatatctttgaaaaataaaagaaacacgtagctagaggaaaaagcaaatgatatgtatttgaagcgtgttagttgcctgcattaccgttagcacgctcaatctgctctcggtccgcaggtaccaagttcgaaagtggctccagtgtattgggccagttcatcaagaccttgagttcgccgtccgctgtatagcgaatcccccgtataacctcgtaaggctctcgcacgccgtcactgtgctccaggccgatggagccgcggtattgcgtcagtcggttgacggcaacgccggcacgtacagactggcatcgccactcgcctcggcctccgtgctgtcatcaaacgcgatgctcggcctactccacgctacttctcgacgtggcttcccgccaacatcattccgaccagcacgtctatgccggcgacatgccggtttcagcgcacaaagcgcttcttgttcacatcactgcccccaacgaccgaccggagccggctcggtggccgtggacacgagcagtgccaccacgatactaccacagcagcgttgaaatagcgcgagatgacgtccctcgtcctcgcctgctttccccaccggtctgtcctcatccaccgaaggctctcgcacgccgtcgctgtgctccaggccgatggagccgcgatactgcgtcgatcgtttgacggcaacgccggcacgtgcagaatgacatcgccactcgcctcggcctccgtgctgccatcaaacgcgacgctcggcctactccacgctacttctcgacgtggcttcccgccaacatcattccgaccagcacgtctatgccggcgacatgccggtttcagcgcacaaagcgcttcttgttcacatcactgcgcccccgacgaccgaccggagccggctcggtggccgtggacacgagcagtgccactacgatactaccacagcagcgttgaaatagcgcgagatgacgtccctcgtcctcgcctgctttccccaccggtctgtcctcatccaccgaaggctctcgcacgccgtcgctgtgctccaggccgatggagccgcgatactgcgtcgatcggttgacggcaatgccggcacgtgcagaatgacatcgccactcgcctcggcctccgtgctgccatcaaacgcgacgctcggcctactccacgctacttctcgacgtggcttcccgccaacatcattccgaccagcacgtctatgccggcgacatgccggtttcagcgcacaaagcgcttcttgttcacatcactgcgcccccaacgaccgaccggagccggctcggtggccgtggacacgagcagtgccactacgatactaccacagcagcgttgaaatagcgcgagatgacgtccctcgtcctcgcctgctttccccaccggtctgtcctcatccaccgaaggctctcgcacgccgtcgctgtgctccaggccgatggagccgcgatactgcgtcggtaggttgtcggcaacgccggctcgtacagaatggcattgccactcgcctcggcctccgtgctgccatcaaacgcgacgctcggcctacttctcgacgtggcttcccgccaacatcattccgaccagcacgtctatgccggcgacatgccggtttcagcgcacaaagcgcttcttgttcacatcactgcccccaacgaccgaccggagccggctcggtggccgtggacacgagcagtgccaccacgatactaccccagcagcgttgaaatagcgcgagatgacgtccctcgtcctcgcctgctttccccaccggtctgtcctcatccaccgaaggctctcgcacgccgtcgctgtgctccaggccgacggagccgcgatactgcgtcgatcggttgacggcaacgccggcacgtgcagaatgacatcgccactcgcctcggcctccgtgctgccatcaaacgcgacgctcggcccactccacgctacttctcgacgtggcttcccgccaacatcattccgaccagcacgtctatgccggcgacatgccggtttcagcgcacaaagcgcttcttgttcacatcactgcgcccccgacgaccgaccggagccggctcggtggccgtggacacgagcagtgccactacgatactaccacagcagcgttgaaatagcgcgagatgacgtccctcgtcctcgcctgctttccccaccggtctgtcctcatccaccgaaggctctcgcacgccgtcgctgtgctccaggccgatggagccgcgatactgcgtcgatcggttgacggcaatgccggcacgtgcagaatgacatcgccactcgcctcggcctccgtgctgccatcaaacgcgacgctcggcctactccacgctacttctcgacgtggcttcccgccaacatcattccgaccagcacgtctatgccggcgacatgccggtttcagcgcacaaagcgcttcttgttcacatcactgcgcccccaacgaccgaccggagccggctcggtggccgtggacacgagcagtgccactacgatactaccacagcagcgttgaaatagcgcgagatgacgtccctcgtcctcgcctgctttccccaccggtctgtcctcatccaccgaaggctctcgcacgccgtcgctgtgctccaggccgatggagccgcgatactgcgtcggtaggttgtcggcaacgccggctcgtacagaatggcattgccactcgcctcggcctccgtgctgccatcaaacgcgacgctcggcctacttctcgacgtggcttcccgccaacatcattccgaccagcacgtctatgccggcgacatgccggtttcagcgcacaaagcgcttcttgttcacatcactgcccccaacgaccgaccggagccggctcggtggccgtggacacgagcagtgccaccacgatactaccccagcagcgttgaaatagcgcgagatgacgtccctcgtcctcgcctgctttccccaccggtctgtcctcatccaccgaaggctctcgcacgccgtcgctgtgctccaggccgatggagccgcgatactgcgtcgatcggttgacggcaacgccggcacgtgcagaatgacatcgccactcgcctcggcctccgtgctgccatcaaacgcgacgctcggcccactccacgctacttctcgacgtggcttcccgccaacatcattccgaccagcacgtctatgccggcgacatgccggtttcagcgcacaaagcgcttcttgttcacatcactgcccccaacgaccgaccggagccggctcggtggccgtggacacgagcagtgccactacgatactaccacagcagcgttgaaatagcgcgagatgacgtccctcgtcctcgcctgctttccccaccggtctgtcctcatccaccgaaggctctcgcacgccgtcgctgtgctccaggccgatggagccgcgatactgcgtcggtaggttgtcggcaacgccggctcgtacagaatggcattgccactcgcctcggcctccgtgctgccatcaaacgcgacgctcggcctacttctcgacgtggcttcccgccaacatcattccgaccagcacgtctatgccggcgacatgccggtttcagcgcacaaagcgcttcttgttcacatcactgcccccaacgaccgaccggagccggctcggtggccgtggacacgaccagtgccactacgatactaccacagcagcgttgaaatagcgcgagatgacgtccctcgtcctcgcctgctttccccaccggtctgtcctcatccaccgaaggctctcgcacgccgtcgctgtgctccaggccgatggagccgcgatactgcgtcgatcggttgacggcaacgccggcacgtgcggaatgatatcgccactcgcctcggcctccgtgctgccatcaaacgcgacgctcggcctactccacgctacttctcgacgtggcttcccgccaacatcattccgaccagcacgtctatgccggcgacatgccggtttcagcgcacaaagcgcttcttgttcacatcactgcccccaacgaccgaccggagccgacacggtggccgtggacacgagcagtgccactacgatactaccacagcagcgttgaaatagcgcgagatgacgtccctcgtcctcgcctgctttccccaccggtctgtcctcatccaccgaaggctctcgcacgccgtcgctgtgctccaggccgatggagccgcgatactgcgtcgatcggttgacggcaacgccggcacgtgcagaatgacatcgccactcgcctcggcctccgtgctgccatcaaacgcgacgctcggcctactccacgctacttctcgacgtggcttcccgccaacatcattccgatcagcacgtctgtgccggcgacatgccggtttcagcgcacaaagcgcttcttgttcacatcactgcccccaacgaccgaccggagccgacacggtggccgtggacacgagcagtgccaccacgatactaccacagaagcgttgaaatagcgcgagatgacgtccctcgtcctcgcctgctttccccaccggtctgtcctcatccaccgaaggctctcgcacgccgtcgctgtgctccaggccgatggagccgcgatactgcgtcgatcggttgacggcaacgccggcacgtgcagaatgacatcgccactcgcctcggcctccgtgctgccatcaaacgcgacgctcggcctactccacgctacttctcgacgtggcttcccgccaacatcattccgaccagcacgtctatgccggcgacatgccggtttcagcgcacacagcgcttcttgttcacatcactgcccccaacgaccgaccggagccgacacggtggccgtggacacgagcagtgccaccacgatactaccacagaagcgttgaaatagcgcgagatgacgtccctcgtcctcgcctgctttccccaccggtctgtcctcatccaccgaaggctctcgcacgccgtcgctgtgctccaggccgatggagccgcgatactgcgtcgatcggttgacggcaacgccggcacgtgcagaatgacatcgccactcgcctcggcctccgtgctgccatcaaacgcgacgctcggcctactccacgctacttctcgacgtggcttcccgccaacatcattccgaccagcgcgtctatgccggcgacatgccggtttcagcgcacaaagcgcttcttgttcacatcactgcccccaacgaccgaccggagccgacacggtggccgtggacacgagcagtgccaccacgatactaccacagcagcgttgaaatagcgcgagatgacgtccctcgtcctcgcctgctttccccaccggtctgtcctcatccaccgaaggctctcgcacgccgtcgctgtgctccaggccgatggagccgcgatactgcgtcgatcggttgacggcaacgccggcacgtgcagaatgacatcgccactcgcctcggcctccgtgctgccatcaaacgcgacgctcggcctactccacgctacttctcgacgtggcttcccgccaacatcattccgaccagcacgtctgtgccggcgacatgccggtttcagcgcacacagcgctttttgttcacatcactgcccccaacgaccgaccggagccggctcgatggccgtggacacgagcagtgccaccacgatactaccacagcagcgttgaaatagcgcgagatgacgtccctcgtcctcgcctgctttccccaccggtctgtcctcatccaccgaaggctctcgcacgccgtcgctgtgctccaggccgatggagccgcgatactgcgtcgatcggttgacggcaacgccggcacgtgcagaatgacatcgccactcgcctcggcctccgtgctgccatcaaacgcgacgctcggcctactccacgctacttctcgacgtggcttcccgccaacatcattccgaccagcacgtctatgccggcgacatgccggtttcagcgcacacagcgcttcttgttcacatcactgcccccaacgaccgaccggagccggctcggtggccgtggacacgagcagtgccaccacgatactaccacagcagcgttgaaatagcgcgagatgacgtccctcgtcctcgcctgctttccccaccggtctgtcctcatccaccgaaggctctcgcacgccgtcgctgtgctccaggccgatggagccgcgatactgcgtcgatcggttgacggcaacgccggcacgtgcagaatgacatcgccactcgcctcggcctccgtgctgccatcaaacgcgacgctcaacctactccacgctacttctcgacgtggcttcccgccaacatcattccgaccagcacgtctatgccggcgacatgccggtttcagcgcacacagcgcttcttgttcacatcactgcccccaacgaccgaccggagccgacacggtggccgtggacacgagcagtgccactacgatactaccacagcagcgttgaaatagcgcgagatgacgtccctcgtcctcgcctgctttccccaccggtctgtcctcatccaccgaaggctctcgcacgccgtcgctgtgctccaggccgatggagccgcgatactgcgtcgatcggttgacggcaacgccggcacgtgcagaatgacatcgccactcgcctcggcctccgtgctgccatcaaacgcgacgctcggcctactccacgctacttctcgacgtggcttcccgccaacatcattccgaccagcacgtctatgccggcgacatgccggtttcagcgcacaaagcgcttcttgttcacatcactgcccccaacgaccgaccggagccgacacggtggccgtggacacgagcagtgccaccacgatactaccacagcagcgttgaaatagcgcgagatgacgtccctcgtcctcgcctgctttccccaccggtctgtcctcatccaccgaaggctctcgcacgccgtcgctgtgctccaggccgatggagccgcgatactgcgtcgatcggttgacggcaacgccggcacgtgcagaatgacatcgccactcgcctcggcctccgtgctgccatcaaacgcgacgctcggcctactccacgctacttctcgacgtggcttcccgccaacatcattccgaccagcacgtctatgccggcgacatgccggtttcagcgcacaaagcgcttcttgttcacatcactgcccccaacgaccgaccggagccgacacggtggccgtggacacgagcagtgccactacgatactaccacagcagcgttgaaatagcgcgagatgacgtccctcgtcctcgcctgctttccccaccagtctgtcctcatccaccgaaggctctcgcacgccgtcgctgtgctccaggccgatggagccgcgatactgcgtcgatcggttgacggcaacgccggcacgtgcagaatgacatcgccactcgcctcggcctccgtgctgccatcaaacgcgacgctcggcctactccacgctacttctcgacgtggcttcccgccaacatcattccgaccagcacgtctatgccggcgacatgccggtttcagcgcacaaagcgcttcttgttcacatcactgcccccaacgaccgaccggagccggctcggtggccgtggacacgagcagtgccaccacgatactaccccagcagcgttgaaatagcgcgagatgacgtcccttgtcctcgcctgctttccccaccggtctgtcctcatccaccgaaggctctcgcacgccgtcgctgtgctccaggccgatggagccgcgatactgcgtcgatcgtttgacggcaacgccggcacgtgcagaatgacatcgccactcgcctcggcctccgtgctgccatcaaacgcgacgctcggcctactccacgctacttctcgacgtggcttcccgccaacatcattccgaccagcacgtctatgccggcgacatgccggtttcagcgcacaaagcgcttcttgttcacatcactgcccccaacgaccgaccggagccgacacggtggccgtggacacgagcagtgccactacgatactaccacagcagcgttgaaatagcgcgagatgacgtccctcgtcctcgcctgctttccccaccggtctgtcctcatccaccgaaggctctcgcacgccgtcgctgtgctccaggccgatggagccgcgatactgcgtcgatcgtttgacggcaacgccggcacgtgcagaatgacatcgccactcgcctcggcctccgtgctgccatcaaacgcgacgctcggcctactccacgctacttctcgacgtggcttcccgccaacatcattccgaccagcacgtctatgccggcgacatgccggtttcagcgcacaaagcgcttcttgttcacatcactgcccccaacgaccgaccggagccgacacggtggccgtggacacgagcagtgccactacgatactaccacagcagcgttgaaatagcgcgagatgacgtccctcgtcctcgcctgctttccccaccagtctgtcctcatccaccgaaggctctcgcacgccgtcgctgtgctccaggccgatggagccgcgatactgcgtcgatcggttgacggcaacgccggcacgtgcagaatgacatcgccactcgcctcggcctccgtgctgtcannnnnnnnnnnnnnnnnnnnnnnnnnnnnnnnnnnnnnnnnnnnnnnnnnnnnnnnnnnnnnnnnnnnnnnnnnnnnnnnnnnnnnnnnnnnnnnnnnnnnnnnnnnnnnnnnnnnnnnnnnnnnnnnnnnnnnnnnnnnnnnnnnnnnnnnnnnnnnnnnnnnnnnnnnnnnnnnnnnnnnnnnnnnnnnnnnnnnnnnnnnnnnnnnnnnnnnnnnnnnnnnnnnnnnnnnnnnnnnnnnnnnnnnnnnnnnnnnnnnnnnnnnnnnnnnnnnnnnnnnnnnnnnnnnnnnnnnnnnnnnnnnnnnnnnnnnnnnnnnnnnnnnnnnnnnnnnnnnnnnnnnnnnnnnnnnnnnnnnnnnnnnnnnnnnnnnnnnnnnnnnnnnnnnnnnnnnnnnnnnnnnnnnnnnnnnnnnnnnnnnnnnnnnnnnnnnnnnnnnnnnnnnnnnnnnnnnnnnnnnnnnnnnnnnnnnnnnnnnnnnnnnnnnnnnnnnnnnnnnnnnnnnnnnnnnnnnnnnnnnnnnnnnnnnnnnnnnnnnnnnnnnnnnnnnnnnnnnnnnnnnnnnnnnnnnnnnnnnnnnnnnnnnnnnnnnnnnnnnnnnnnnnnnnnnnnnnnnnnnnnnnnnnnnnnnnnnnnnnnnnnnnnnnnnnnnnnnnnnnnnnnnnnnnnnnnnnnnnnnnnnnnnnnnnnnnnnnnnnnnnnnnnnnnnnnnnnnnnnnnnnnnnnnnnnnnnnnnnnnnnnnnnnnnnnnnnnnnnnnnnnnnnnnnnnnnnnnnnnnnnnnnnnnnnnnnnnnnnnnnnnnnnnnnnnnnnnnnnnnnnnnnnnnnnnnnnnnnnnnnnnnnnnnnnnnnnnnnnnnnnnnnnnnnnnnnnnnnnnnnnnnnnnnnnnnnnnnnnnnnnnnnnnnnnnnnnnnnnnnnnnnnnnnnnnnnnnnnnnnnnnnnnnnnnnnnnnnnngatcccccgcttgtgcgctgcggtcggcatgtcgctggcatagacgtgctggtcggaatgatgttggcggcaagccacgtcgaggagtagcgtggagagggtcgaggtgcgtgttatcgggcggcggtgtggccgcgtcgactggcaatgccattctgtacgtgccggcgttgccgacaaccgaccgacaaagtactgcggctccatcgggctggagcacagcgacggcgtgcgagagccttcggtggatgaggacagactggtggggacggttggggaggacgacgggcgtgatctcgcgctattgcagcgctgccgtggtagtatcgtggcgtcattgctcgtatctacggccagcgtgtcggctctggtcggtcgttgtggacaacgaagcgaacaagaagcgcttgtgcgctgcggtcggcatgtcgccggcatagacgtgctggtcggaatgatgttggcggcaagccacgtcgaggagtagcgtggagagggtcgaggtgcgtgttatcgggcggcggtgtggccgcgtcgactggcaatgtgattctgtacgtgccggcgttgccgacaaccgaccgacaaagtactgcggctccatcgggctggagcacagcgacggcgtgcgagagccttcggtggatgaggacagactggtggggacggttggggaggacgacgggcgtgatctcgcgctattgcagcgctgccgtggtagtatcgtggcgtcattgctcgtatctacggccagcgtgtcggctctggtcggtcgttgtggataacgaagcgaacaagaagcgcttgtgcgctgcggtcggcatgtcgctggcatagacgtgctggtcggaatgatgttggcggcaagccacgtcgaggagtagcgtggagagggtcgaggtgcgtgttatcgggcggcggtgtggccgcgtcgactggcaatgccattctgtacgtgccggcgttgccgacaaccgaccgacaaagtactgcggctccatcgggctggagcacagcgacggcgtgcgagagccttcggtggatgaggacagactggtggggacggttggggaggacgacgggcgtgatctcgcgctattgcagcgctgccgtggtagtatcgtggcgtcattgctcgtatctacggccagcgtgtcggctctggtcggtcgttgtggacaacgaagcgaacaagaagcgcttgtgcgctgcggtcggcatgtcgccggcatagacgtgctggtcggaatgatgttggcggcaagccacgtcgaggagtagcgtggagagggtcgaggtgcgtgttatcgggcggcggtgtggccgcgtcgactggcaatgtgattctgtacgtgccggcgttgccgacaaccgaccgacaaagtactgcggctccatcgggctggagcacagcgacggcgtgcgagagccttcggtggatgaggacagactggtggggacggttggggaggacgacgggcgtgatctcgcgctattgcagcgctgccgtggtagtatcgtggcgtcattgctcgtatctacggtcagcgtgtcggctctggtcggtcgttgtggacaacgaagcgaacaagaagcgcttgtgcgctgcggtcggcatgtcgccggcatagacgtgctggtcggaatgatgttggcggcaagccacgtcgaggagtagcgtggagagggtcgaggtgcgtgttatcgggcggcggtgtggccgcgtcgagtggaaatgccattctgtacgtgccggcgttgccgacaaccgaccgacaaagtactgcggctccatcgggctggagcacagcgacggcgtgcgagagccttcggtggatgaggacagactggtggggacggttggggaggacgacgggcgtgatctcgcgctattgcagcgctgccgtggtagtatcgtggcgtcattgctcgtatctacagccagcgtgtcggctctggtcggtcgttgtggacaacgaagcgaacaagaagcgcttgtgcgctgcggtcggcatgtcgctggcatagacgtgctggtcggaatgatgttggcggcaagccacgtcgaggagtagcgtggagagggtcgaggtgcgtgttatcgggcggcggtgtggccgcgtcgagtggaaatgccattctgtacgtgcgggcgttgccgacaaccgaccgacaaagtactgcggctccatcgggctggagcacagcgacggcgtgcgagagccttcggtggatgaggacagactggtggggacggttggggaggacgacgggcgtgatctcgcgctattgcagcgctgccgtggtagtatcgtggcgtcattgctcgtatctacggccagcgtgtcggctctggtcggtcgttgtggacaacgaagcgaacaagaagcgcttgtgcgctgcggtcggcttgtcgccggcatagacgtgctggtcggaatgatgttggcggcaagccacgtcgaggagtagcgtggagagggtcgaggtgcgtgttatcgggcggcggtgtggccgcgtcgactggcaatgtgattctgtacgtgccggcgttgccgacaaccgaccgacaaagtactgcggctccatcgggctggagcacagcgacggcgtgcgagagccttcggtggatgaggacagactggtggggacggttggggaggacgacgggcgtgatctcgcgctattgcagcgctgccgtggtagtatcgtggcgtcattgctcgtatctacggccagcgtgtcggctctggtcggtcgttgtggacaacgaagcgaacaagaagcgcttgtgcgctgcggtcggcttgtcgctggcatagacgtgctggtcggaatgatgttggcggcaagccacgtcgaggagtagcgtggagagggtcgaggtgcgtgttatcgggcggcggtgtggccgcgtcgactggcaatgtgattctgtacgtgccggcgttgccgacaaccgaccgacaaagtactgcggctccatcgggctggagcacagcgacggcgtgcgagagccttcggtggatgaggacagactggtggggacggttggggaggacgacgggcgtgatctcgcgctattgcagcgctgccgtggtagtatcgtggcgtcattgctcgtatctacggccagcgtgtcggctctggtcggtcgttgtggacaacgaagcgaacaagaagcgcttgtgcgctgcggtcggcatgtcgctggcatagacgtgctggtcggaatgatgttggcggcaagccacgtcgaggagtagcgtggagagggtcgaggtgcgtgttatcgggcggcggtgtggccgcgtcgactggcaatgtgattctgtacgtgccggcgttgccgacaaccgaccgacaaagtactgcggctccatcgggctggagcacagcgacggcgtgcgagagccatcggtggatgaggacagactggtggggacggttggggtggacgacgggcgtgatctcgcgctattgcagcgctgccgtggtagtatcgtggcgtcattgctcgtatctacggccagcgtgtcggctctggtcggtcgttgtggacaacgaagcgaacaagaagcgcttgtgcgctgcagtcggcatgtcgccggcatagacgtgctggtcggaatgatgttggcggcaagccacgtcgaggagtagcgtggagagggtcgaggtgcgtgttatcgggcggcggtgtggccgcgtcgactggcaatgtgattctgtacgtgccggcgttgccgacaaccgaccgacaaagtactgcggctccatcgggctggagcacagcgacggcgtgcgagagccatcggtggatgaggacagactggtggggacggttggggtggacgacgggcgtgatctcgcgctattgcagcgctgccgtggtagtatcgtggcgtcattgctcgtatctacggccagcgtgtcggctctggtcggtcgttgtggacaacgaagcgaacaagaagcgcttgtgcgctgcagtcggcatgtcgccggcatagacgtgctggtcggaatgatgttggcggcaagccacgtcgaggagtagcgtggagagggtcgaggtgcgtgttatcgggcggcggtgtggccgcgtcgactggcaatgtgattctgtacgtgccggcgttgccgacaaccgaccgacaaagtactgcggctccatcgggctggagcacagcgacggcgtgcgagagccatcggtggatgaggacagactggtggggacggttggggaggacgacgggcgtgatctcgcgctattgcagcgctgccgtggtagtatcgtggcgtcattgctcgtatctacggccagcgtgtcggctctggtcggtcgttgtggacaacgaagcgaacaagaagcgcttgtgcgctgcggtcggcatgtcgccggcatagacgtgctggtcggaatgatgttggcggcaagccacgtcgaggagtagcgtggagagggtcgaggtgcgtgttatcgggcggcggtgtggccgagtcgactggcaatgtgattctgtacgtgccggcgttgccgacaaccgaccgacaaagtactgcggctccatcgggctggagcacagcgacggcgtgcgagagccttcggtggatgaggacagactggtggggacggttggggtggacgacgggcgtgatctcgcgctattgcagcgctgccgtggtagtatcgtggcgtcattgctcgtgtctacggccagcgtgtcggctctggtcggtcgttgtggaaaacgaagcgaacaagaagcgcttgtgcgctgcggtcggcatgtcgccggcatagacgtgctggtcggaatgatgttggcggcaagccacgtcgaggagtagcgtggagagggtcgaggtgcgtgttatcgggcggcggtgtggccgagtcgactggcaatgtgattctgtacgtgccggcgttgccgacaaccgaccgacaaagtactgcggctccatcgggctggagcacagcgacggcgtgcgagagccttcggtggatgaggacagactggtggggacggttggggaggacgacgggcgtgatctcgcgctattgcagcgctgccgtggtagtatcgtggcgtcattgctcgtatctacggccagcgtgtcggctctggtcggtcgttgtggacaacgaagcgaacaagaagcgcttgtgcgctgcggtcggcatgtcgccggcatagacgtgctggtcggaatgatgttggcggcaagccacgtcgaggagtagcgtggagagggtcgaggtgcgtgttatcgggcggcggtgtggccgcgtcgactggcaatgtgattctgtacgtgccggcgttgccgacaaccgaccgacaaagtactgcggctccatcgggctggagcacagcgacggcgtgcgagagccttcggtggatgaggacagactggtggggacggttggggaggacgacgggcgtgatctcgcgccattgcagcgctgccgtggtagtatcgtggcgtcattgctcgtatctacggccagcgtgtcggctctggtcggtcgttgtggacaacgaagcgaacaagaagcgcttgtgcgctgcggtcggcatgtcgccggcatagacgtgctggtcggaatgatgttggcggcaagccacgtcgaggagtagcgtggagagggtcgaggtgcgtgttatcgggcggcggtgtggccgcgtcgagtggaaatgccattctgtacgtgccggcgttgccgacaaccgaccgacaaagtactgcggctccatcgggctggagcacagcgacggcgtgcgagagccttcggtggatgaggacagactggtggggacggttggggaggacgacgggcgtgatctcgcgctattgcagcgctgccgtggtagtatcgtggcgtcattgctcgtatctacggccagcgtgtcggctctggtcggtcgttgtggacaacgaagcgaacaagaagcgcttgtgcgctgcggtcggcatgtcgctggcatagacgtgctggtcggaatgatgttggcggcaagccacgtcgaggagtagcgtggagagggtcgaggtgcgtgttatcgggcggcggtgtggccgcgtcgagtggaaatgccattctgtacgtgccggcgttgccgacaaccgaccgacaaagtactgcggctccatcgggctggagcacagcgacggcgtgcgagagccttcggtggatgaggacagactggtggggacggttggggaggacgacgggcgtgatctcgcgctattgcagcgctgccgtggtagtatcgtggcgtcattgctcgtatctacggccagcgtgtcggctctggtcggtcgttgtggacaacgaagcgaacaagaagcgcttgtgcgctgcggtcggcttgtcgctggcatagacgtgctggtcggaatgatgttggcggcaagccacgtcgaggagtagcgtggagagggtcgaggtgcgtgttatcgggcggcggtgtggccgcgtcgagtggaaatgccattctgtacgtgccggcgttgccgacaaccgaccgacaaagtactgcggctccatcgggctggagcacagcgacggcgtgcgagagccttcggtggatgaggacagactggtggggacggttggggaggacgacgggcgtgatctcgcgctattgcagcgctgccgtggtagtatcgtggcgtcattgctcgtatctacggccagcgtgtcggctctggtcggtcgttgtggacaacgaagcgaacaagaagcgcttgtgcgctgcggtcggcttgtcgctggcatagacgtgctggtcggaatgatgttggcggcaagccacgtcgaggagtagcgtggagagggtcgaggtgcgtgttatcgggcggcggtgtggccgcgtcgagtggaaatgccattctgtacgtgcgggcgttgccgacaaccgaccgacaaagtactgcggctccatcgggctggagcacagcgacggcgtgcgagagccttcggtggatgaggacagactggtggggacggttggggaggacgacgggcgtgatctcgcgctattgcagcgctgccgtggtagtatcgtggcgtcattgctcgtatctacggccagcgtgtcggctctggtcggtcgttgtggacaacgaagcgaacaagaagcgcttgtgcgctgcggtcggcttgtcgctggcatagacgtgctggtcggaatgatgttggcggcaagccacgtcgaggagtagcgtggagagggtcgaggtgcgtgttatcgggcggcggtgtggccgcgtcgagtggaaatgccattctgtacgtgccggcgttgccgacaaccgaccgacaaagtactgcggctccatcgggctggagcacagcgacggcgtgcgagagccttcggtggatgaggacagactggtggggacggttggggaggacgacgggcgtgatctcgcgctattgcagcgctgccgtggtagtatcgtggcgtcattgctcgtatctacggccagcgtgtcggctctggtcggtcgttgtggacaacgaagcgaacaagaagcgcttgtgcgctgcggtcggcttgtcgccggcatagacgtgctggtcggaatgatgttggcggcaagccacgtcgaggagtagcgtggagagggtcgaggtgcgtgttatcgggcggcggtgtggccgcgtcgactggcaatgtgattctgtacgtgccggcgttgccgacaaccgaccgacaaagtactgcggctccatcgggctggagcacagcgacggcgtgcgagagccttcggtggatgaggacagactggtggggacggttggggaggacgacgggcgtgatctcgcgccattgcagcgctgccgtggtagtatcgtggcgtcattgctcgtatctacggccagcgtgtcggctctggtcggtcgttgtggacaacgaagcgaacaagaagcgcttgtgcgctgcggtcggcatgtcgccggcatagacgtgctggtcggaatgatgttggcggcaagccacgtcgaggagtagcgtggagagggtcgaggtgcgtgttatcgggcggcggtgtggccgcgtcgagtggaaatgccattctgtacgtgccggcgttgccgacaaccgaccgacaaagtactgcggctccatcgggctggagcacagcgacggcgtgcgagagccttcggtggatgaggacagactggtggggacggttggggaggacgacgggcgtgatctcgcgctattgcagcgctgccgtggtagtatcgtggcgtcattgctcgtatctacggccagcgtgtcggctctggtcggtcgttgtggacaacgaagcgaacaagaagcgcttgtgcgctgcggtcggcttgtcgctggcatagacgtgctggtcggaatgatgttggcggcaagccacgtcgaggagtagcgtggagagggtcgaggtgcgtgttatcgggcggcggtgtggccgcgtcgagtggaaatgccattctgtacgtgccggcgttgccgacaaccgaccgacaaagtactgcggctccatcgggctggagcacagcgacggcgtgcgagagccttcggtggatgaggacagactggtggggacggttggggaggacgacgggcgtgatctcgcgctattgcagcgctgccgtggtagtatcgtggcgtcattgctcgtatctacggccagcgtgtcggctctggtcggtcgttgtggacaacgatgtgaacaagaagcgcttgtgctgtgcgcgtttttgcgtttttagcctggtcaccgttggccataggtggtaagctacgtcgagggcggacccgagctgtgtgtttcgccggcaccatggcaacaaggcgatagataagatgcgtttgtgaacgtggtcgtgcactacatctacaggtcgtgttgtcaacgcccggctgggaactatcgtggctcgattggctctatgacgacatgccgtgtgagagccctagagagggacgggctaaccaggtagccgagctgtcgcgccatgggtactgcgagatatcaccggccttggcgatggactccaccacgttcgaccaaaagcacatgcgtctactacatgtatagtcaagccgggtttagaagaagaaaaaaataactctaaaggcgcaacgcactgtcgacctggtcatttggtattttcctacccacgaccttggtggtcatggcgaggagatcggctcaccgcaggcatcagcgcagtaccaagcagcagcgtcagcaacagcagggctttcacccccagcatggacaatgcttgccgcgtccccgctgcagactccgcatccatctctgtccgccccgacgcccccgccaagagttccgttgcgatcgccacaatcaccagcttctgtctcgacaagtcctcctagatcaccaaaccccccgacagcgtttgacctaacgagagtttctggtgtgctgacagcgtctggtccagcgagggataccagttccctgggagctccatgctcggcgaagtccggcaatcaagagatcggcgcggtcagcgctgcgacgaccagcccgatcagtgacgacggtttcgctagcgacgaagactacacgtatgacgaaggcgaagagaaagaggaagaaggaggtgtgcatggcgttagtgttcctaatccggcgagagctcctagtccggagagagctcgtcggacgacgagtgctcctggcttggcgatagctcccggtccaccgaaagcgggtagtcctcctggagctcctagtccgccgagagcagctagtgccccgacagcctctagtcctccgcccggctcaccaggagagacggctgacgctgagtccgagactgacgaggacccgccgcaagttgatgaagtaccgcctgaggagagggcgtatccctacgtgcgcgtagttggtactgagcgaatggcggatggagagatccgagcgtgggtggaatgggaggacacgctcgaacttttttccgccttgtaccctgcggatgcacgcgcccttgcaaggtacctgcgctgaccacagcaaatgcctgtcgggcctcctacaaaccactacgaggttatacggggtatacactatccagcagacggcggcctcagggtcttgatgaactggcccaatacactggagccactttcgaacttggtacctgcggaccgagagcagattgagcgtgctaacggtattgcaggcaactaacacgcttcaaatacatatcctttgctttttcctctagctacgtgtttgttttatttttcaaagatattcaacaccgtcctagtcaacgtgttggatgtgtgcttgccagcataagctgctcagtgtagtacgcagcttcaaatattactcaacggaattgagcttcacagctcccatcactaatggaaacgctgttgaccgaactgcgtgccagcgtcaacggattgccgtccgcaacgcctaaaacagcttttgctgatcaaatcagtatcgactgcggccaacgcccctacgctggccgtggacacgaccagtgcctccacgattctaccacggcagcgctgcaatagcgcgagatcacgtccctcgtcctcgccaaccgtccccactagtctgtcctcattcaccgaagtctctcgcacgccgtcgctgtgctccagcccgatggagccgcagtattatgtcggtcggttgtcagcatcgccggctcgtacagaatggcatcgccactcgatttggcaacagtgcctctagataacgcgacgctcggctattcctcccctgcacaatgacatgatctcctttcagcagctccgtccgcatccgcatacgcccagtaccggatctcccgcgacacgcgctcgtagtcatcacgcttcgtggtcgctcgcttcacctcgtcaacccttcggacatggaaaataattccaaacctctcgcaccagcgacgcacgtattcacactcggctccgctctcggcgcggttgccgtagtcaagatgcactgccacgatcttgaaccctccgtgcttgtcactcagcttgtgctttaggttaggtacgccaccaccatcgagtccactcccccagacagcgacactgccgggtgcgagtgctcacgcgccttcatctccgtcagatactcatccatcgcccggtacagccgattcctgggcatgtcactctcgtccgtctccgtgaacgcgcgctctaggatgtcgccgtccgaaatgccacccgtcgtcgtgtccgtgaccggtcctcctcacaggtgctgcagtctgccggtcgtcgtgtgccggaactttgctcctgcaattagcattagagaagcttcatgagattgcagcagtttagcaagacgaacgatcgtcgttggcaaaaatgttcatccgtggcacttagtgctggttctcatattttgttctgtgcaatactctgccagaaccctggacagaacacaaatcataatgtagccacagccgtcgctcgtgaccggcggtgccgtaatctgtgtaataatgcgtagcgacagtactaatgcgtagtgactgggcggatggcctggcttttgctcgctcctgtctttagatgtgaaatagcgacatattcccgcatatatggttttgtataacatgtgaaaaatataccagtatgtgtgtatgtaagctccgtatgtcagcagatccgacgagtaaatatttcacttaacggatcatccgacattggtgaatgaggggttaagagacaggcgtggtctattttagagggcagagtatttgcaagcggcaagaatagttgctaaataaaccgttttgctgacagtcgactaagtcgagttcttgaactacgtcaagaagatactgaggacgaccagtgtctcattttggcctggaaacttaacaaagtggccattaaatgctctgggccggagcaaaaacttggaatccactcacaaactattgagctaggctacctagatatacagagagagagagagagagagagagagagagagagagagttaaagctactgcggaaccctgctgatatgaattttgatgccactatcgtattgagtggggaaagtattcagagagtgcctggtgcgcagcatgtgcggcgcaccgaagccgcttgcaatgcggattagacaagtctggacgagctattccagcacccgcgaagccttagtagtcaatcgtcagagtttcgcgaaatgagcggtatttgctcacccaacaggtagatagatcgctctctctttttatttaaaattacgcaactcatcgcttcgtctacattcgaaccagagcacgttatgggccagaatgccacctataatgacatacaggtatccaaatctgcagtgacaatattaacaccctccgttccatgtttggcgagctgagacgatgtactaagctttcaacatttgaggcgtacagcttacgtagctcgagctagcagacatgatagcacgagatattgacaagcgttgcccagctataaagtatgcttcagcggatgcatagcgtagtttatttgtgaaatcctaagcaacctttcacaagagtacagcgggtggaaaaagtcatagcccaccccaagcccgccacatacatatagtaagtcaaaacgatttgcaagcccgatgacccagtgtttcgacctacccagttgcatccagcaacactaacgatacaatgcacacatgaggcgaaaggtactcatgttgtcatccatataagcaaaccaggatcccgagaaaccaagaaacggatatgatatcgtgcaatgtctgagggcattcatcacgttttgccaggcgttggaagttcacaatctggtgatccaatacaaaaaccaagataaactcagattggaccgagcggcgatttgtcaaaatccagtctttaatagccaatggaattcgagcagattatagttcaaacgattccgcgtcgaatcgtgcgaaaccaagaagaaatgacaattttgtgagttgaagcgctgttgtcatttcacttgcacatctttttgacttggtcttagtatactgacccgcacaggtagctcggggtttctctgcgcgctgtagtaataactcgtattagtcttatcttagacttgtccttgattttatacatgtagccattcgtagctttaaatgtaattggttaggttaacaagtactctatttcggttagaaaggtacctggtttcggtaagttacaaaacttttctgccggccaagcacaacctgtgaactttccactgtagcccaaatcaggttaattcgcacctcggtaactgaagccggtaactgaggccggtatacgtggtcctttgtcgctgtctgtctttctattggtgacccggtaactgaagctggaagctgaggcgatttcactttctgtctagtagagctaaacatcaatcgtgttgcgcctgtgatgaaccgagcatgacttcagcatttcgaattcagcgcagattggtgacgcacatctcgactacctgcccacccgcctgctctgcctcgcgggctacaacgattgccgcagtaccaccaccaaggaccccaaactatcaaggccacgtgtcttccggcactatccagttgactacgacgctaaactagagtagcttcagctgacaggtgttgtccctttagtcgtcgtagactgtgagtgcgcgctggtctcgctgatgcgtattcccacggccataccagtgcatcactgtgtactctcttagtgttgcccttcttcagctgtacggaggaatcaaccacccgtgacggctagaaacgcgcaaacgttgctgcaaaccatttttcgacagtcttgcctccttgtctatatgtgaacttttccacatttcatcttgagagataagtccactgtgcggacaagtttttttctttacaaaaaagtataaatgcagcagctacaagatagaaacgatactcaatctatgtagtacatgtacatgtgcagccccacacggaacgactggaaaagtcaaggatggcgcacgaatccaatggctggtggtgctgacacaatacggcagccgcgcggccagcgcggcaacaacaacgcgagcacgcaaaaccactcaaacagtggaagcgtatcagctatgatcgtcacgaccactacgaatgacaagtttttaagttgggaggggtgtatggctcatccactagaagatatgctaccttaggcataagtttagaacccaaaaatgacaaggcatgcgaaatcgcggcattactaagaatttgtataatgcgctaggattctcataaaagtatcgctcacgaagccgcctcggtcgtccacacagacggttatttggacgctgaggcgggctcatagcgcttcttatcacttgctaggcaaaaggagcggtgcgtacgggcgcctaccgcgggctcgtatcctagagatctagcgatacgaccacggagatgcagcagtgcgcgtatccgtgtgtaggtagccgactaaaccgcaacaaattcaaaactctaaagaggcggtgggtaactaaacttccagcgatcggtcggattccttttcgattgtcgtgatatgcccccagacgtcagcgaagtactcccatgtcgccggtagtcgaagactaccagtcgtcaaacgaaagcagtcatcgctacagtattattcctccaaacagagcattctaatttgtgtcaaaaaccctggttggtcccgtaaaattgctaccccagcctaagcgtagcccaagtttaaaaaataagttatcgactcaacgagagcagaagacggctaaacggctgagaaagacgccctgggcaaatggagcttctatccgcaccatgttgccatcgccttccacttgttcttagtgcccgctatagactgtcttttcaagttgcccaaacagagtgtactcaaaatgtttattactttttctcccttatccagcaaccatttctctaccgccagtgtctggtcggggtgaactgtgcaattatgcagcaagagtcgagtcggggcgtgtccgaatcggacggggagcagtattaccatgaccagggccagcagcagtacgccgaggccgccgtctccagccccccgacgccgagcagcgacgagcaccagagcgtgctggtgaccgtggagcccatcgacaagaccatcttctcgaactggaacgagttccacgagtacttggccgagtaccagcagcgcacgttccaggtctactccacgcgcacggtgacccccgtgacgacgaggaacaagcgcatcaaggagcggtacgagggccacgggaagaccgcgcccccagatgaactgctgcctgaagagatgggcatatacagcaaaggggtggtgtgtacccatcatggccaaccccgaccgagagcggcggggctgaggacgagaaagccgtcaagggcgatcaactgtccggcacgggtaagcaacatagttgaatattgctattattcttatgttgcttattaactttttttcgtgttgttggtgtgtagatgactttactgctgaggaaggaccacgccacggggcagtacttcgtgtatgtgacgtcccacatcgcgcaacacaaccacgagctctccggcggactctatcgcagacacccgatgattcggaaggtcgatgaccctgatattcttcggacggtgcgcgctctcatgaaggccaacgtgcagccgaggaagatcctcgagtacgtgcgtgaacacacagacaaggaggtcgtgatgcgggacgtccacaacttgctcgcatcactccgaaagaaaccttcagctgcacctgcgcctccagctcggacgaccagcacttcagttgctcccagttctcctgctcctgctcctgctcctgctgcaccatcaactgctggagtgcttgagcaaccatctcaatccgcgggaggtggtgctacacctcctgctgtagctgccagcacccctcaacctcctcgagttgctgttgcacctcctcgtgccccgcaaccaagcgttgctgtgtcggctgaccgacctctatccttcgtgataaggaacgcgggtcaagctcgaccgcaacatcaagctcaaccgcagccttcacccccagctaggagggagcaaccgtcgcagtatggcaagtttctggcggccttcaacgtcggcaaggacattgcagagctcatggccgagatggacgacgatctgttcgctcactgctacgccgagctccgcatgttcctgcgaattatcgagagcggaagaatccccgttgttacgacccgagaagccatggaacacgcgcagaccaactcagcgagtgtccccagcagaccaatgccccagcagcaggcgttccgaattgcttttgctccgccttcaggtggtccagctactgctgggaacgggtcaacaaccaacagttcggctcctgctgctcgaccgttttcctccggctagacaaaaactagctatcagtgcaagttttcattaaccggtactaatgtatgcttcagctttccaatgccctgtaggtctgccgtctagttgacgtaccagagatctccgacgctaaacccatcgggcagactctcgatcgccagccccagctccttggagaacgtcgcgggtcggtcttggttcttgttcaccgccgcgtagtacgccgcgaaggcgtccatggagctcgagtagtcttcctcgatctcgacgtcgtccatcttgcgcggctgcttgagctgctccagcggcgccggcttctcctcgatctcgaactcgacgccgtagatggggttggtggagaagacgctgtgcagactctgcatctccttgaagagttcgtggagtcgctcctccgggtccacgcggaagcccaaaatgtagccaccactggccgcggacgtctcgatcaccagcgccggcccgaacttggagccgcggatgcgagccgagttgatctgcatgtacgggatgctgacgttgaagttctcggccaggttggcgtgccacacgatgcgcacgttggtcacgaagaaggtgccgaggttgccctggtccgaggacaagttccagacgccgttgagtcgcgtgtagacttgctcgtggggcagcagcgtgagctccttctccttgatgatggcgcctcggagcttgagctcccggtagagcttggtggtctcataggagcggaacacggcctggatggtggtgaagagcctcggactggccttgacgagactcgtgaagatgaactcgaaccgactgttggcgtacttggtcatgacgtacagcgcctgcgtgctgccgcgcagcttggacgtggccgtgcggatcttgaggctctggatgcagctgtagccgatgctcaagttggtgcggatggacttgtgcgaggcccagagcagccgcaggttggtgatctcgagcgacccacggtctccgttgttgcccttggtgtcctcgaccgagttgatggagtccaccaacgtctcgcccttgcggagctgcatggccgccgccgagatgtcgaagcggatctcgcggtcctgccaagtcacggcctcgggcgcggcgcggatctccgtcgccatggctactgctggtctagagaggatctacctaggatagccgattgaatcgatcttaaacggacgcgtccgctcaagctcaaacgcactacgacaaagccaaacaaatgaatctcacttttacctcttactcgagtcgcgtaggcgcgggtggcggctgctatcgctttgtttcatgggtccggtcttcctcccttcgcctctaaatgctacaagcagtgaccctccctaacttacgccagcgagcgctccattgtctgctgcagcagcgcgctgaaggccttctgctccagcttgagacacacctttgtggtgcccgagttgtcgaatgtgagctcgaacagcgccacgacgttggtcatggtcttgacagagaagtacgcgatctccttgccgtcgatcggccgcttggccacgtagaagacgttgtggcggcccagctgctcggacacggcgtcgactccgtgcgcgcccgtggccagcgcgaagtagtgctcgttggcctcggggatgccctgccacatgctgataaactcggtcgacgccatgctgccggcctccgtgaagatcgccgacaggtccagctctgactggaagtagacgacgtcgccgctcgagttgttcttgatagccacctgcagattgaggttcggcgccacggcggcgttgacgaactgcggactgacgcccataggcacaacctggttcacagtttggcccggcaccagcggctgcgggaacgtcactgttgcctgtatgggcaccacgccgaatgtggacttgttgaactggatgctcacgcccgcgatcggcgcaggagactggttctcgaagtccacgtccagcacgaagttgccaccgcgccgtgtgaaggcgcccgtcatctgcaggcccttgccttgctgcgcactcatcagcagcttcttctgtacagcgggagccacaccgccaacggtaaccggagcaggcggggcggccgggccaccgaaaatgtcaacaagactagcgctagcgcttgccggtgccgcagcgggagcaggagcagtcggggcggggccgcccagggaaagatcgcccatgtccagcaggtccactggtccactgctggagccttcctcgggctggtcggaagagccttcgtcctcgtcctcgttgctgtggtcgtcgtcctggcggtgctcgcgcagctccgagaccgtcgtgcgcaccacgaacgcactgggtagcttgtggtagacgctggcgagcgtcgagatcttgccgatcaggtcgtccagaaccgaaggctcaagcgcgaacgtgtcgtcgctgatcacaggcttctcggcgagcacgacggcgtgggcggcttccgggttggccgaaagcagacgccagtagacgtagccgcggtcgcgcaggtccgggttgtccgactcctccgtagccttgtgcagcaccttctggaccatgtcctgcgtctcgttggggcgcttgaggaagagcttcacagtggcagtcagcaactgcagctgcacctgcgcggtctcgtcatcgaacgagtccatgaacgactccagcagctcgtcagcgttgtcgatacgctcggcgtactcgccgatgatccagatcatggacgccttggcctcgggctcatccagcgtgtccagattctcgcagagcgtggcgatgatgctctcgtactggttcgggtacttgcggaagatatccttgatcacgatgatcgcctcctgcacgatgtagttcaccttggtctgaatgagctcgagcagcacgttgatgcacttctccgcggcgcgctccagcttgacagcgcagcggccgatcgcgcgcaccgagcggcgcacgaactccacgtccacctcggtcgcgtactccttgaactccagcagcacctgctcaatgttcctctccgagaccaggcggatgataatctcgagcttctccatcttgacgtagatcgggtcgttgtacttgcagaagaagaccttgatctcattagccaggatcgcggggcgcttctgcacgatcaggttaatgttgcgcagcgccacgtactggatctcgggctccgcagacagcagcgtgacgagcggcggggccatcttcctggacaggctcctctccgtgtccgcgtccgagaccttctccaggaacttcataataaccttcaccgcggacagcaccacggccgagttggcgtgctgcagtctgggcgtgacgcgctcaatgatgccctcggcctccctggagtccgcgggcgtgtagcctgccagcgcgtcgagtacgaagacctgcccccactcgttgcactcgttgagcgccgccagcagcttctgcagcacggacttggtgatcttgaaagccatggcaccgccgctgttctccgagatctcactcaaggccgcaatggcgttggccacgaccgttgggttggagtccgagatgaggtccttcagcatgtccaggaagccctgctcctccaccatgtccgggttgatgtcgtagagcttggagacgcagatggccgccgtcttgcgcacgtacgggtcctcgtcctgcaggcagcggcgcagcggctcgcacaggtactcggtgatgcggtccacgcggatgcagcccatggtgcgcacggacagcgcgcggatgagcgggttggggtcggcggcgtccttgacgaacgtgttgacggccaggatggtcaggtccgggttgctcttggcgtagttgatgaggtagaggtacacgagcttcttgagctgcgtgtcggccgtctggatgcagttgaccacgtccgtgaagagcatggacacgtccttgcccaccgtcatgttggcgatgaccttcttgacggcgtccttcttcttctcgcggctcgggttggccagctcctgccgcagctcgtgggtctcgcccttcttggtggtgctgaagaacttggagtcgttcgcggcgcccgtcatgcgcttggcgatcgcggccatcgtgggcatcgccatggctgccagaacgtgcggggggttgcgagctcacagaggaatcgccttatgacgcggcggctttttggctctacgaggcgcgatgaagcgccggatatgaaacggacgcgcggcgcggattggtggaaaatcggcaagtggtgtggacgacgtaatgtagccatgtggacccacttcaacaaaaaggaaaggaaaggttgcctttcactttgtgaattggcgggacggagagaagcctcgttctccaggccctggagggcgaggcttctatgacggaccatcactctctcaggtgacgcacgcgtactcttaaggagtgcagttcctctgaagcagctccggcagctctccgaattgcttccatccaggtttgtcgctgtggtggatccgctcctttgaacgcagacgccgcatcttagcccgcttccttcggtatgaaggcatcttctactatccaacgagcggtgggaagagttagcgcaggggatggttagcttccccagaccatcgagatacagaagcgggaacgagaatggcccgcgatgaagctcatcacgattgtctcggcgttgcgctgcaggagggtgatacggaggtgagtcttggatatcttgagtctgatctccacttgggctgccgtgctccagcttcaggacgaggttgtcccccgattcgtttctgagcgcgacttcgacgaccagcgttggagagcagtccgcggtagcgcagcccgccatcgagccctaccgacctcctgacaggccgcccgcagtcggggagaacgtcccgtgcctggcgttcggctgcgccaagccgtcgtcacctacgctccggatcaagacttcagcctcggcagtgttggcaagcgttgcgggttacctactggtgttgaaaaagatgtgctgaatggggcgcttaatgtatgcggtacgcagtggtcagctatgacgtactaatttcgagatgctgacaacctgctgctttaccccacctcagcagctttgctctcattctccagtcacctggattgctccttctcgaacgttcacgaaagccaagtcgtgagtgtgagtgtggcaaagtgattcaagtctacacgccgatatcgggggtgagaagtgctatctgctagcagtactcgcctacgagtttagtgcactctcggttcactctctccacacacacttcgcggtctcaccccacttagctttcacgaactgcgagttggtgcatgtgaattcacttggtggcaaaacgccgtgacctccagctccatcagcatcgcttcgattcacgtagcaacatacttacacgtctccattttcacggtcttcatcacttttatcctgcaattctagcgcaacgacgtcctgaaagatacttactctctgcgcgttcgttccgtatgctgttgccggtgaaagaggaggcgtcccctttgcgtccaaaccggagcccgactaatccagcatcaccagcttcttgttaagtttcggtagctctccgaatcgagcagtaccgtcttcatcgattccgttggtgccaacattcagtatccgcagcgacaattggaactggttaagaatcgctgatcctgatcggatcttatgccagcatctccatccagcgcgcagccagaatcagagccgccgggttcaatgctgtacgagtcaaaataaggtgtatctgcaggtgtagcatgttacaatagtagaatgtctagaagctgagatatggataaatatcgtgacggtgccgacacatatgattttatacttagccattatatggccgtcatggcccaatcaaatgtccatgagcgattattgtaggataagaaagaggagcgtgcgtacagacaacgacggataaatacggcaacgcaaaaccggcacacatatgttgtacttttacaataagtaattcagatagccaatcatcttcgagatttacacttgacatttgtcatccatatggttttaagtactttctctaaatttgtgtgtactttatgctccgttacgtgtattttatgccattgccttgtacaatctctatcgttcccgacagagaattctggtacatttactatggaggatgccattcagtggtgccggatttatccgtcgttgtctgtaactatacggatttgtggtgcaaaatacacaactctggggagcaaccatattgtgggggatggaatatataaccctgactagagtataataacatggttcgaagtataacggccggccggcggatttaccccggcctcttagccggacggcaaaattgcggagcggctgaattgactcggcttcttatccgagtgactggattgctaggaccccgcagcgatcggttgtacatacacagctaactcaaacgcttatactgcaaactcacaggcttctactttcttcttgttgcgaggatgtctacgtggatacagctctctcttcttgacagcgcggatgactatggtagctaccgtgatcagctcatgtgttgtaccgccgtttttcacacagtgggcttcgatttctgccgcatctgtggcggaaagcacacgatgatagagcgtcgactgaagtgctcaagtaaaacctgtataaggtttggcaagtgtggagttgtgtggaaggtattccattgcaagggacaagataagtggcgcgtacttgtgaactcgaacggccacgcgagaggagtgctcacgtgcagcgaacaacacactcccctcgtcactcgccctatgaaagcgtttatcgctacccaagatgaggttggactgccaccccgggttatcgaggtccatctgaagaaacagttcaacattcgaccgtcgcggggagggtggcctacgctttctcaggttcagatcgccctaaaacgtatccgaaaagaacaagggcccaagaactctatccaagcaattcacagactggcccgatcgcgctgctacaaacccgagaacccaccagaaacggcatttgtgtttggtgcaaaactggacgtcgatggcatgacttacgttggctcgggagatgacgatgacccgtttattgtcggcgtgacttcactagcaatactcgacagttgtattcgcttcagtacgggtgatgctctttcctgttccatgctgacacaaccttttgagctgagtgatattgggtaccccgtgataacctgcgggttcaccgaccaagccaggagataccaagtcggagctttcttcgtggtgagtcgccgcaccgagcatgagtaagctttccatgcatctacaatactgcagccatcgctaaaaccatccttgcgtaacatgaaaccaggctcccaagtgtcttcccaccgatgaccatccagttcgtcacaccacttaacgcggtatcgaaaacctcgaccgactgcagtcctgtcgatgataggaaaaactttccatgtagttttcacgcaggccaggcccttctgtacagcaccacttttatcaggtacatgtaatgcagcacttgcagtttcgccagtcgcaggatcactaaaagaagccacctcacatacagcagccatagtggacggatcgtcgcaaccgtggaccgtgtttctcgcaattgcgctcggccgatttcgtacatacgagtaatcatactgctgccgtccaccctcgagtcgcggcagagataagctgcatctgccgctccgacgcacttgaattcacacgacatgcttgttaagatcgcagtaggagctggttgctttcttcgcccagtatacccgctgcccccctcgtggaagtcccatcgtccttctgcaacacgcatcagtcgagcccgggaaaccgtaacgagggtagcgagtcatggagctggcgatacgcgtccctgtgtcgaaattcagaagcgaaatctacagaggtagatcgaatgtcttccgattgagtgattaagctaatacatcaatcaggctcttctggagaatccaggatttcaaattccatcaatcggcttttcgattgacggactacaaatgtcagtgtgctgcgtatacaaactttgtgagcaagcattgatccttgttacactgccttaatcaccgccgttaaattttcagtgcatagtttgacacggactttgcgttgccatgcagtacaagcgtgaaaaagtaattcttccccacggcggagttacgcgaattctgctgcttggcaagattgcgaatgcggctgcttggcaagatcgacgccgtgtgctaatccaaacatgtggcgtttgtgcagtttttgtatgtatgctttggatgcgcacctctgtatgttttgcccgaatttctgtatggcggggaccttgtgtcgataagaaagtgttttcccaacatggatgtagttgccctaaccctatcttgtgagagctgctcgtaggctatgagcagctatgagtcatagcccaatcgatttgtctcatcatagaaatttagccaatagcatttgtcgcagagctattcccaaacttttcccaattatgttggtacgagctcacaattacaggataatgtcctataccaacttcaaatgtaaatgttaacttatccctaatatcgcgatatttcccaatcacattgttcgagtaacggctggcggagaagccatctacgctggaaaggctccgactccagagtactctacaagatgcagcgagcagcaagggggcttgacgtcccacaggggacagcgggccaggagtcggcagccttaaagtgcttcgctgacttcttggctctgggtaacatgagcgagagctctttagagtgcattgcaaagtcgctagcggagcctggagctctacctagtcagaacttttactccctactaaccgccttcgctatatacctgcaaactagaaagagtgcgcgtggcggtctcttggccaaagctactgcggtggggtatatgtcgcaggttgttaacctattgcgagagggttacccgaactacaaggctgacagcaagcgaatcgccaagattcgcgagaagatggcagcggccatcgacgagcgaaatctgcttgccggtgtgcagaccggggaggctcctggctgtacgctgagcgatctgcgcactctagtccaggaaactgcggttgcgggggttggatctgggtttaaaagtttgcatgactcgactgttctaacactaatgtggcacacgtttggccgtgcaatagatacttgctttgcgagaaagtcccaactctccatcgcctcgtcgggcaagctgttcctacatgtggcgcgcatcaagacatcggtcgtccaggggatctctatctacaagtcagcagttcactggagcagtgcatgtttcatgcactgggcatgaggttcgtgggggcgtcagaaccgtcaagctacatctttcccctggcgccccacgttgcatcgtctgagctaccaggggagaaaacctacagtcaagacgaggcgatcatgtactggaacaatttagaagacaagcccagctccaaagaagaaccaactgcaaagagagtgcgcggtcgcccaaatgtatccaaatacattaacgacgtcattacggaggtgactgagcgcgtttcaaaggctagcgcaccgctgccgccggccatgactgctgggctatcaagccattctctgcgacgcggctcagctgcatacgccaacgcatcgcctaagctagccatccagtggatatcgacgcgcggggcctgactgcgggactcgctgacgaaggcttttgcctacgtcggcactacgacccgcgaagaccagagcgttgggaaagtgctggctggctacaacgaccctcatcttccgtgcgcgacgccgtcgatccagacgctgcaagaggtcttgcctgcgctggagtacgcgcagctgctgtcgctcaaggcccagctcttcaggactgtgagtggcttcaccgacgtgacgctcaacgtcgacaatcttgtgctggacgctgtgatggcttcgctgctcatacatctggaggaggtatccgcagcggtcgcgaaggagcaggcttccatcggctacacgtcacactatctctaccgtttccacatcgccctcgacaccaccaacaccgctctcggctctgggttgatgctggcgacatgcatcgggtggggacaccagcttcgagccgcctgggagacggagaacttttcccaacttggtgggagctgtgacggcgacacggctgtcctggcgtcggctgtgatccagatgctgtcctctattgctgcgatgcagcggaccttggcgaagctggtagcgatgcaggagaagagggacgtgcaagctggacgggcccaggcaccaagtgagagctccacgccgccaactgccctggtggcaacaaacagcagcagcgtcatcgtggaggcgcacacgcttgccggttgcttctacaattggtatgtcctgcaactttggaacacagcaacaaacaaaaagcagcgatttgctcgagcagatctcaaggcatgcattatgttaattgcgtcaggtgcccacagctcaatacctgctcagccgctggaccatgatggcgtatcgtatcgcctctggaagcagacactgtgaacgcttgccgaggagctggacaagaagacgaatcaagcgctagggatcctggacaacaagggtcgctgcaagactgctggatcgcttctgaaacgctggcgcaagctgcgcgtggagaaccgtgctgcgttcgacgctatctgctcggcctacatcttgcgcaaagggaacggtggtaccgttgatcattgcacacctgtggcaagcaaaagacttcaagtaagaggttagcggtacataggatagctcagttaacaccacagtacatatctttcatgtaaaactggcagctggaattgaaccagcatgctcccagctaatgcatgggcgcctttccaatcggacataccagtacaacgtggatacatcgcgaaaacagcttcaaacacacgcgcagtgtccacacggatgcactcaaaggaggcagccaggcaccgcggtcacacgcacctttagctctctaaaccggcagcataacgcccgccctgccggtagagagatccttcgagtgtccatgtccagcagccagcgtatccggctcgttcgcggtcgtagttggggcggcggggcgcgggcgttcttcctctttgtcgggtgagcttctgtttggcggtggcgaagagagaatgccacgcggcggggcgcaagtaagaaaaacctcgaggttttaccctgattaggatcggataatctaggcatactctggtcaagtcattgggaacacagccatgtagttggctcgatgggttttggactgagcttgggaactcgtcgattaatgtcgaatgaggaggcggatgaatcgtattttattcaatcatcagcgctaggggtaggtttatgggttgccgacactcctgccgacgtataatgtcggcaaggctgtcgaaatatgctatccacctatagtgaggttaagtaattaggcgattatacacatattttgcttgctgccgacacttcacattgagtttgtattgcgtttgtttgcctgttggaagcgttttgtatggcgcattttcttacatcacaaattcgatcgagttttctcggcaacgccttacccgcatgcgatgacacaaagaggcttcaggtaaggcgttgctcatggggctgttgtcgctgcagctgaggtgccaccagcgacacatgcaagtgactactgagagagatcaaagcgaaacatgaactagcaggtatttaaaatctataacaatatattcattattaaatcaataaatgcaatggctacttgtgcactacagcactacgcaccgtcacgccagtagaaagcgtcgcttcaccgcgcagcggtggtggcagcggcggtggcaccaccagtagaagcggtatgccacgtcccccgcctccccaacttgacagcagcgagcgtacccctcgccaccccagggttcgaaaactcgcagccgttggcgcgcagtcgccgcgctgctggtgctggtgctggcactgctgctgctgctggtgctgcttggcgaggccggctactgctgcgggcccctcagctggctctgcagcgccgcgtgctgctgtgtctgctgcctgctgctctgatcttcacaccttctctgtcttgggtaccttcttcttcatcttgtccttgcttcatgcgcgtgtcgtccagcgagggcgggtggaaacggccgccaggcgaagactttttgtcggccgtcctccccctcgctcttgccgtccgcgcacttggtgccttcgccgcccttcttgctcttggtctccccgccgtccgtcgcgcccttggtgtttctgccgtccttcgtgcccttgatctccaagccgtgctccgtgctcttggacagcccgtcgtcctccgcgctcttgggatcacctcccccgatgcctgacgtcttcgcccttcctgtcctgggtgacctgggctggctgcgagggcacgtgccctcacactcggcgaggcggtgagcaggttgcggaggtgatgagccatccttgagatcgctctcgagcctgtgcaagactggcaaggcacgcactccgggcctggaggggagggggcgtagcgaaggtctcggtgctgctagggcgtcgctgcgctcatggtcgccgcgatcatgaccacgcaaatgaaaatggaagaagtgctaaaatgttgccgtttagaccaatcgtagaaattcatcatttccaccaatgatagatagtgtcggcaggtgcaggccgctgtcggcaccgtcatggtatggcgtaaacgaaccgtcgacacaagttacccaactttaacaaattgtgtgggctttttgagcgggatcataagataaattgtcacaatttcggttaacgcaaattcacgcgaacgcaatgcaggcatcggtttccctcggaaggccccagtcttgggtacgcgaacacggaatcactgtattgcatttgcgatgttttttgaaatatcagtttgagtactggcaagactgaaagtttcttgcagcagttattaaagatgagcccagaatgttcgcgcaaccgattgttttatggtttggcgaccttacacagtagtggtatttaaaattgccaagtctcgtcagctacgctccagataaagattttttgagctgcttggtttgataagactaacgctgactggtatttttttgtgatcactgacgctgccgtcatgcaggcgactgggcagtcatctgaatcagaaggtaaggttttaaacaggttttatgcagacctggtcctgttttggtcctacggaatctaaacgagaccgaacagaaatcagtatgatttctctagcgatcccgtttggatggcgagacccaaatgatatcactacgaaacaagccagttttagacccccttcatcctgatataaaatgtcgtgatagatcatagagggcagccgctattgaagtagagctggagattataatacaaaacccaaatgtctgaatttgcgagcgagtgtcttgctggtgtcgatccctggaccgtcgacgctgctcgaactgtacgctattgctagactttcttaatgagctttaactaactgggttgctcagacgtcctcgtgcctgaatctactgctatcttcttcgtccatgtattcttgtatgcatgtaccgctgatccttggtacttggtacttgaagtacttgcttgtactttacctctgcaggaagctagatagtgatccagtgatcgacatccagcagggcgctagctcgcagctcgccctccacatcccacagggctagtgtctcacagtactgcttcgcacgagtacttcaagcctcggctcctacccaaaatgaacttctcgattgtccctaagaccgcaatttaaggaaaactacaattggtctagcctaagacgcgttcttaagttcccgggagctgggaccgggacgaacgggacgatacccctcgtccgtcaaacttgataattgtaagcattttttaagcccctaactctcgggaactaccgcgaactacagtgaaagaagaacatggtcagatagtcctttcgaaacgtaacaaagtggtgcacacttggcgcgtattagtgaagaaatgaagtagctagggcgaaagtcccacgtcccgacatttccactgtcgccgccaagctcaacatcccccccacgtgtagcatgtcccgccccagtagccctgaccctgacggcctaaaggcgctcgccgaagcgccgtcgctcgctgaatgcattggctacaacgacatttgggctcgcccgctgcaggtccaaggcctcctccacagcatgatgatggctcgcgccgggagctccgccacagctctccagtacgaagacgctggaagtcaggcagctggtctcgttgctaccggtaacgtgctggcgaacagcagcttgtctggcgcagacaacatggctacatctcagcctaccggtggtgcttctagcacgccgacagtgtccgcggccggcagcggtgcagacaacgccgtcaccagtggaagcaaggctaaacagaagggcaagcgatcgtcaagcacagcgagaaagaaacgaacggcactcacggctgacaagaagcctaacgcagtgctcgaatggaccaacgtgatggtgcacgacttgatgtcgctgcgctacgaagcgcacgccgcccgctttagcaaagccaaaaacaacgcagccttgaaggaagcgtggctgctgctagctactgagctgagtaccaaccaaggcatggccatatcgtctgagcaatgcaagaacagagtttttgatcgcgcgtgttacgacgttgcacctcgcccacctcctcttcagtttcgtcttcggcatttactaaacctacggaaacgggagtggtgtcttgaaagtcgatcagtagattatgtagcaccatacatgccactataatccgcaccgacgcgcttggtgtgcggtcctcgagtggcttctttaacattctgaagcgttccttcaaaagcccaaaggcgccttcaattgccattcgggttgaagataggtaaaagttgaagttggcttgcagtgcggtgagcttaccaccttcgtcattttcacagtacggtgtgatgactgttggagatacaccatagccggaatctgctataacgtggtgtccacggggtagaatgcaggcaatatttcggccgaaacttgaatgttgaaatatcttggcgtcgctccaagaactcggccgcacatcaaatgaaatgaaccttttgcggtggtcacaaaccgcttgtacattgactgaagggaatcctaaaaagcaacaacaaagtttagaatgcggtaaaataaaagcttctcgctcaacaatactacctttgcgattgtaccagccttcaaagtctcggggtcgattgattgcgatcaaagtgccgtccattgctccgcagcaaaacgggaatcctcgaacttggcgaaaaccattgacgatcgtatcccattcttggggtgtttggggtagcttgatgcatgtagctcgcatttctgccaactcacgaaccaacatgttaaccttaacaatacatcacgattttgacacaccaaatgcctgagccgtttctctaaaaaccccacttgagcctagatgaaatagagtacaagctatcagtatccgcggcggcactgcagatcacagcacatcgaaatggctacacttacgtatcgaacatagatttctctataagaaccctcttatgcaaaaatcgcaattggaaagcattagagcacgcaataatggctgcgcccgcgacgtccaagccaccgacgcacgtcgtgttcgagacgaccgtggtgcgtttcttcgctgtctactctgctgcatctactctctcttcacgtggcatggaaaaaatctagagctaaaatggcgtgcgattggctacaataacagggagacttcaccatggagctctacacggagcacgcgccccggacctgctggaacattgcggagctggcgcgccgtggctactacaacaacaccatcttccaccgcatcatcaaggactttatgatccaagcaggagaccccacgggcacgggccgcggcggagagtccatctacgggtaatgtagccatgacgcacagtggagactgtcttccattatggctgcgatgcggaaggatcacagtattgtgtattgtgtattgcagagccaagtttgacgacgagatcaccaaggagctcaagcacaccggtgccggtgtgctatcgatggtaaatatttgttcagactgctccatggtggatggatttatgtgcttcgaagtaggagcttgagaaaggctgaccggtattttgttgtcggttgttgtggtgcttttgtaggcgaattcaggcccaaacactaatggcagccagtttttcatcacgctggcaccgacgccatggctggatggtgcggaggggcttaaatccgtagtgtgtgtgaaagcggcaatttttgtcgttgacagtcgtgtttttgtgtttatggtatgcaggcaagcacacggtgtttggccgtatctcgtctggtatgaaggtaattcagcgcatgggcatggtgccgacgggagcgaacgacaggtaaagtaaagaagggtggatttattacgcgcgtgttgaactgggttacagccgaactgacattttggcactggttggctgtagaccgcgtgaagagatccacgtcaagcgcgcgtatccagtttctcaatgagaagaccgtggtagagactcaattgttgttccttgaacagcatcatgtaaggacgtcatagattgcgcttgctacgatcatccgcgaacggattgcttgtcgtgttacgtttgatggagatagtcatctgtgggtgggtggttgtgggggcaggcagcagcagcttcggcggctactatcgagacggccctatgaggagaagctgaagagtcacttggtgtctccaaatctgtttggcgtgaaagatgaccgacttctccaggtagcagaacactccgccacatatgaacacgccgggcggtcccgaagccagcagcatcgacggaggtctcgtagagccatcaaacaatggagaccacgcagtgccggaggtggcgacagtcgagctgctccatcaaacagaactggtgcggtctgaaggaggtgctgctgaggacattaacagtggcgatgcaagtggtgacagccacgaaaacaatggagagcgtgacaatggtgcaactttgcctcggaaagtggcctggattcagtcgatcgagtctgtggcggatctccggtcaagcatttttgagttcgtgcctcctgaggctaccgcggcttctgcagacagcagtcttcaagcacagcagccaactgtggtgagtgtcgagcaagttccagccacgccagagtcgataccccgtgcgaagaagcgcgtgagcttttcgccagaaatcgaaaacactctcgcccacgaccacgttttcttgattgatgcatcgacggagcggtctgagctgctgtccaccatggagcagtgccgtcagatggagagaagctacgtcgttcctgacgatatcccgtcgtttgggtggtgggactgcttccagctcggactatccctgacgtacacgactatttgtcttcggaaaaacatctcggctcggtgtctggctttcgacgaccagcagaagcagcggaaacggaagctttcgagtatttcagcgacgcagatctcggtcctagcacacgccggattggccttcaattgcagcacgaggtcgttgacagttcgccaaggccagccacctccacagctaatacctgcgccagcccaacggaaaccgaagcgaaagagacgtcacaaactcagacgtctcgggttcatcagcatggtcgtgagacttcggcatcggaagcggatgaaaccgaaatcaaggtacaagtggatcgcgaaactatccgaacgagtcccctcacgtgcaaaggacaagagcaagaagactatcaagcctaagcccgcgtctaaacctaggcgtccagttagactgaagctgaagctcaagattaatttcaagttcagaggcaagccgaagtcaaatgggagcgatggattagagagcgccagtgtcacgaagatcaagagagtaacgaagggcccggacaagcacaagatcggctcttatggggccattgcagtctttcgagctctccgggtaaatcgagcgctgttgaccctctcccttgagtacgtcgcgatcaacgactcagccatgagcgctctagctgcggctctgcgcgtgaatacggcgctcactcacttgagtctcgttggcaatcgcatcggtgcagctggcgctcgcgaccttgcagacgccctggaggacagtccagactccatgctgatcgacctgaatctccgtgacaaccgccttggagctcaaggcgctgaagaacttgggcgggcgctacgcgagaacgagacgctcacgcgctgcgatttctcgtggaaccagatgggcccacacgctgtgcttgggctgctgtcagcgttgagagacaacttcgctcttcgtgaactctgtgtctacggacgcgatctggctgaagatggtacccattatcttgcgaatctcgactacgactcggccaagaggattgttgtggcgctccgccacgtaaacgagagctttgctgtggctcggcttactggcgctcgagctatgcttccgattgacaagatgaagacgtcaagatggatacatctagcggatcgcgaactggttgagctcgatggactcgtgattgcgggattgattcctcggaactccatgctgctgtcacttgatctgcacgacaaccctggattggggagagctgcggtattggggttgctgtccgtcattagacgctgccctacacttcgagatgtggatttatccaacacgggtctattccctgacgccggcgagagtcttggagagctcgtggttctgaacagcacactcgagaccatcaagctgcacgagacagtgttcgctgtccagcaactgcgtgggaaccgacgagcaggggaagtccccgacatgatggcgttcacagttgcgtccaagcatttcttggatttttgggttctcgccaagtgtcttgctgtgaatcgaatcacccaggagctcaatgaactgcgtctgcctgctacgtcgagctccgccaaggcagcagcgattgtgggcgtgacagcaaacgagaaagaccatcgagatctggtgactgtcaatctgtctggacgtccgctggagctgtacgaggcggcgttcctgggcaagaagatgttgcaccaccttcatctcggtcgtgtggctctcaacagctgcatgatcgacggtgcagcagctcgagcgttggctgacggagtgcgtaaccacgctactctacacacactggagctggagaacaacccgctgggtcctaccggaggccaggcactggccgagtgcttggcagtgagcagcgctctcacgtatctcaacttgagctggacacaactgggcgacgatggcgtcatggccttccgagaggcattgactcgcaacaagtccatcgagaggctcgatttacgagggaacgagctgcgagtgcgcggtgttgtggctatagcggagggtttacgtcgcaccgccacactgcgggaactccatttgcgatggaataccgtgtcgcctgcgggggctgaggcgctggcagtcgcgcttgaggtgaaccaaagtctgcacttgctggacatcgagcaccacacgatgggagcgcgtggtgccgcagcgtttgcgtccatgctggcgagaaacaagcatctggagcacctcaatatgtgcggcaccgactcagacgacgcgctggatgcaggtcctggcatcagctccgaacaagctcagcggatcgctgaggcactcgccaactctaatcggtcgctgcggatactacatgtcggcgccaaccgaatcgacacagacgctgctgctcgattcggggagctgctgaaattcaacaagacgctagtggcgttggacctgtcgcgctccgggctggacgcgaagaaggcgcctcggttcttcgcctgcttgtcggtgaatacaacgctggagcggctcaacctggcgtacaatcgcattgggaatgagggacttgtggcctgcatgcgagctctggaaaccaatcggacgttgcgggagcttagcttggcgtacaacggcatgacggaagagcccctggcggtactggcggccaggctgcacgcgccgaagaggttaatcacgccgacgctggggtggctctgtctcacaggcaacaacatgacggaacgaacacgcagggagtacctggcactgccgcagaatgtcattgcgatagaactgcaggataaaagtgatgaagatagcgaagatacagaggtttaatagagtttgacttcgagaattcagagttaggtcgaccacaattcacggcttcgtggtatctgaaacgcaccaattcgtggttcgtgaaggctaaccggggtgaaagagcgaagtgagtgtggagagagtgagccgagagtgcagtaaatccccgggcgtggttgccagtcatgcatacttggttcactaaacgcaacgcagcagtcagtcagtccgtcaacttgaaagagcaaagcaaagctagcatctgcttctcaccactcgaaccagcatttgaccgcagtttttatctgcgccagccgcaccctgcgccagccatctttgactgcgccgccgccgaagtcatgcacccagagactcgcgaccgtcggaagcctacaaagccgcaatcttctgcttttaatcctaccgggcgatcgcgtggacttgtgcgatgctgtataatacaaaagtcagtaaccaacgaaaaaatatacgagaaagagaacagggacttacttggcgaagacgaattgcgtcgcgtacattcaacaggacggctgacgagactggtattggccaagatcaccagcgtctccgactcgcctcatatactacgtgatgtgctgcgccgttgataacaacgacgtaccgagtgtcgagctcctgctaactcggttggaggacgccgcgagggctgtcgatgtctacgagacgttgtgcccgtcccactgtttctcctcggccgccgcccgcccctgcgtccaaggcttctctctctctcttcctcatcaattcacaaagttaaaaggcaacttttttttcttttccaacgttgttgaagtgcgtccacatggctacattttcatcatcccttagattttaggagacaaagtccgagtctttgatggtgacgctggcgaatgcgtcgtcgagtgacgagagcttgtcgatctcggctgcatgggaggacttggatccccagaggttgggcgggtacgcgatgttggtgtccacctcgcgctcgatcatcacgacgtcaccggtgatactgatcatgttgtacacttggttgcggtacagctgactggactcgatgggcacgaggcggaacgtgagcatggcgttgccgcccagtgaccgcacgtgggcgcgcacgatagcgatggcttcgctcaggaacaggtggtagaacgctcccagaccgccgctctcacgcaccgtccagctctcctttatgaagtgcagcgtcacgcggcccaggtagcgcgtcacgtgagctccaggaatgtagccaagaggagtcaactcgatccattcgcgaccgtacggagctggtgccgccattccgccgcgaccagagcctggggtgatgttgcggaagtgcgagaagcttcgaatcgggggcggcatctgaatgtggagcttggacgggctgccgctcttaccggagaggggaatgtcgtgcaccgctggcgaagctgacgagggtttggttggcgagtcgggctcttccatctccagcgccatcgcagcgttgttcagcaggttgtcaagcgggtcttcccagttcttctccaggacggccattccactcagaacaacctcaagctgcgggtcaaacacaacaaggattagctacggaggataccacgcagagagagagagacaatcctttgcataccatagtttcagaggccaccgcgactcgtgtcttcaagccgcagatagcgcagggggcgtacgaccgcaccttgaacagcagactaacaattggaacgaatgagcaaccggcgagcaacacgcaatcgctacaaaatcaatgtacctggcaaaaagctccttgaatacaaccgacagcagctcgttcagacgcgtatcacgcatacggtcttcgtcccattctactcgcttcatcgaaacaatcagatgcacattctcgccaggagtgaagtctccaggtaatcgatccgtgttgcacatgtaaatgccctgcagcacaaattattagacgtcataccactgccagcgtgcaagatacacaagctgctaacttacctccggcagttcttgctctaatagcactgacatgagatcttcgtccgtctcgtcatcgatttcaagcacgaatgtctccttggagtcgctaaaaccatcgacgaacgcttcttcctccgactcggagcttgactcggaagacgagctgagtgtctttgagtcgttgtcgagagaagtctgagatcttggcgcgggaggtgtgtctgagcctgcagtgggagtcgtggtgccgccggcatctggtgtagctgaagcctctggtgtgggagtattctccgcactgccgctcggctgagtagcaccgctatcgtccgaagaaggttgtgccaaccgctttcgacgcgcgcgtcgtgctgacgatcgagattgagcaacctgaaatggacgcttggaccccttcccgctatcatcatcttgatccgaagacagagaagtactgggctgcaattgattgcgcgcaggtcgatttccgccatagtactcatactcaggttggacgacgcatatccggtctcgatggagctgtttgaatttccgacaaaccacgtaagaatctatataaatggggtgggttgtgctctcacgaggtattttacgcaccctgtccttgttgaacgtactgagctcttcaatttgggcttgcaattggacgaggcgtcggtcttcatcgtctttcacctagtcaaatgaaaatgtacgcgtcagccaagattcatcaaatgattaagcgatttcagcttacatctatgtttcgctcgattcggagcgttggtgggggagggagagcgggaagatagaggcccgtgccagtaatgacaccgacaatcaacgagcctccgacttgaatctgcgaatcaaatgcgaatacggcatttacgccaagcactcgcatcttcacgatgagctgggcagaagacaagcacaaggtgaagatcaataaagccgaatctgcactagtgatctatttcgcttgcgtacctgtcgatacagctcgtattcgaggaatggcaaagcatccgacacaatcgtggcgttaacatcacccgttcctttcctgcgctgacgacatactcgcgcctgaatgaatgttccttttcccatcatggcgaggccagcaggaggctcaatagatgcgatcatcatctcaggaacccatttgtttccacatacaccgcagcgaaccatccgcatgctgcaaccgcacgttcacaattcagtaacaacgttgagcacatccaagccagaaagtgaaagcaccacaggaacagttttgataacgtacttcgaaaacggtgccaacgatcgagagtaaggaatatggcataatagacaaggggatttcgacacccggctccgcctgatcatagccgcacataacgaactcgcgttagtaaatgcattccactttgtagcacaacttaattgcgtggtggccaaaccttgtctttgctcttggaggaacaggcgggtgcgccatgtacgagaacgagggactgcggcgaccaagcgaggcgggaacctccggtagagggaggttcagcatcggcgatgacgctgcgtgtaaatcgggaccatcatcgtctccatcatagctgacagccacgtctcgacgggtggggcgctcttcaagcggatttttcatcactgccgcggttcctctgctcatatcacaaagcgtcagatgtaggttttgctcgtagaatacccacaacatgagctggtgtagcgataacgtacgaggcagatatcacacacacatcgtcatggatcgtgcaggactcagtatagccgataacgaaggggcattgcagcgactgtgcatgagcccggatctgcacaaaaacaacaaaaacagtcgtcaagcccatgaacgtcgagcagcaggcaacacaacactttgtcaacgaacctcttcacgcagctcaagccaccacgaatctctggtctcctggtccgccaactttgtcgccaatttgcccaggtacttcaccgagcgggcgctgacaatcccacccagacgaatcctcgttgcagggttaaacaccttgagcgtgatcaattgcacctcctacagtacaacaaccaaaccgcaccaatcagttcaccaaccctcctcaccctctccgacttttacccaactcacgtcatgtgccgagatattaaacgcctccggagccttcaacgacttcaacactctcctcgggaagtacctcggggacacgagcgcctccacactctcccccgccgtcatgtcatccacatccacactcagctctccatcgtgtccatgcccgtcctcactgtgcgtgcggtgctggccgcctccttcccctgacatgagctcgttcttccccacgggcgtaatgaagcacgccgtgccgcacgccctcgccaccagcccgctgtccccctccacgtcgaagaactgcttgtacgccagcacggcgtttccgcccagctccagcgccttcttgcccacgagcgtcaccacctgcgacgacagcttatacagcagcagctgccggtgctcgttgctcctccgggacgtgcggaagttgtcgctccacgaatactccgggtcggcgtgcaccaccagctcctccacgaagcccagcatggactcaatgcggtagagactcgggtccagcgtggacagcccgaagaactgcacgcctgccgaggactcgcggaacgggttcacgtccccgaagtactgcaggcggatgacgaggctcagctcgcagcgcacccccaagagcgtgtcgtacacggggaaccagccctggatgacgtggccgtcgcgcatgagcaggcagttgaggtccacgtagacgatgcctacggtggcgtccgtcgtgtacacgtcgtggtccatgagcttgaactcgatgggctgcgactgcagcaccgagtcgtcggccacgtcgaagcggaactcctcgtcccacttggggttgagcgtcttcttggagacggacgacttggcctcgaagctcgcgaacgtgatgcccacgtacgcgtccgccagcttggccgcgcggtccaccacgggcatgtcgcgcgcctccacgagccggatcttgatggtgcacggcatggctgctcccggtcaactgaagtgcaggatagaatggctacactaggcagaacggggattggtggaaatcagctcgtcgtaaaggatgggggttggtggatatgacggtatagtgaaccccagtcagttttacaagatgatggtctgggtgctggttgcagtgctgctgctgctgggggctggagctgctgcgggtgttgctagccgccgccggaggttctcgttggatggaaaggtcgtggttatcacgggcgcggcgagtggaatcgggcgtcggctggcgctgaaggtgtttggggaggcgaagggcgtgacgctggcgctgctggacgtggacctggaagcgctgcgcaagctgcggacggagctgctgcagctgcgggagaacgagagcaaagtcgcgtttgtctacgagtgtgacgtgtcggactgtagggcggtggacgagtgcatcgctcgggtggtggcggacgttgcacccaggcaccttggggtgctggtgaacaatgcaggtcggtagaactttagtgaggggttatatgcggtgtgtgcaggtaggaaggaggaggagggtcctttgaaggttatatgcggtgagttcgagtggctgagtgttgtgcggggttttaggcgtcgtgatggggcggtcgctgcaggacttgacgcctgagcagatccagaagacgttcgcggtgaacacgctggcgcacttttggacggtgaaggccgccctcccgtcaatgaagaaggccccggaggcgctgctggtgacgctgtcttcggtcatggggatgacgagcagcgccgggttgacggactactgcgccagcaaggctgccgtgaacgccttccacgaagcgtgtaagtttgcgttctacaattttttttggctgtttttgtattaagttgaagatttgttgttgctgttgttatgaatgaagtgaggttggaactttggcgcgacaatgtcaagacggttcgaacgctgctggtgtgtcccgctgctgtggacacgggcatgtttgctggtgttttggctgcggatgattgggctgtgaagctctcccgcttcttcattcctatgctgcccgagtctgaggtcgtcgacacgatctatcgagcaattctgcgcggtgacgagttgctgatttcgtgtttttcgggctggagaggaatcgctctggcgtgggcccctgctctctctcggatgctgccggttcctctgtacgatgtggtggttcggttgggcgggggcctgaatggcatggatacgttcgtcggcaaacaacgcactgttgcaaaggaaaaggcgacttgaaactaccgcacacactatttgcttgattccgttcttttgtagagctcaccagcaagtcaaagtcaccgcattacaaccggtctctgaaaacaaaaaaaaactgcgttcattaggcaccgcgcgattcaaacggaacacgaaaacccacaccattccacacacacacgctttgaagccggaagttgcgaggcgaagctcgtgctgaagccgtgagaagttctcactgagagcaccgaaaccgccgacagctcttactacacttcagtcgtcaaattttactgctgttagttcagctcccacatttgccggagaccccatgacgataacagacaactcgtcctcaatctcaaagtagctgctgtacgtgattgaagcagtggtggcctgtgtgccgcacgggacggtatccgaggcaatccgctccgcgttccgttgcagttgcacgcaagaagtggcgagttggggcgccaagaaaaccttcaagctgatgacgtaccacccggcgacgaggaagcagatactgttctcttcgttcgctagcgtgaagaattcattgtcgatgatccactccaagctgctgcctttcagcttggggacgtttttggacgcagcgctgagatggatcaccttcttggccttttcctccgcaagagactgcttggtctgctcgagctcctcctggacatcgcggagcttagcttctaatatgccaacgcggtcgagcgagagcggctcgaggcggaaagcgtacttggcgttccaagccgagcgaaagacccggattttcacggtgagctccaattggagagcgtcatccccgagtggggtcaggctgcgacggattttgcctggatccaaccccgtggcttcttgctccgagtcagcgtccgagtcaccgccgtccgagtcgatggacttctcgctggcgctgtttccttcgaagtcgtcatcgacctcttcaggtgatcggtccatcaggtactccagagcatccttgaatagctggccggcagcacagatatgtttgggtttaagtagtttgttctaatcttttgtgttgcggttgttgtagtgagagtaatatcaccttgacgtagtccgccagggtggcattaggaatactgttggttgtggtcacgtattccttctcgtccaggaagccggtgctccactgcttcttgctcttgcggtcctctaggaggatcttcaccttctcggcctggctcgtgagcacgaagcggtacgtcggcgctgggcgaggcgcaaacgcagtcaccccgctctcgatcgtctaggtcataatttcccacttccacttgtcacttcgaaaccagctggttccatcttcacctacgatttagctgctatttcttatctttttaaggaaatcgtaccttgttttatcgcacaactacgaactgctcaagtccggccttcagatgtcatcacttgttgacttggacttatactttgccgccacgtaagtattatataagatgcacatcaaaacccagctcagtgctgcgcatcgaaactcggggcgggcccagcgataagagctgccagtatgattttagaaagtgaaagtcactgagaagtgcacaaatctctcgtgcgagacacaatactacgacactaaaaatcttatccgaagccaccccacgatgaactcccgacgggcgatattttaactttcttcactgccctgtgggtcgaggtcattgctacgagttgtgctcggttggggccgaaggcacttaagtaggcgacaacacctttacaaattgtaagcttcacgttatttacgtgtactgtaagcttaggcattgccgagcaagtcccatacatgtacaccttgtataggaagaccccggtgctgcaaacgttacttctctggatcgtgaggtctcgaataagactttcgcgctaagatctgttagtgcaagcgcgttccagttccctccgcggtaccactggtactaccagtgcccttggcaaggctgcaagcccttgcagcgtcaacaccagtctttgtcgcttgcgtccgttggaaggtccgacgtctatcatggcgtggagacttaggcgtcaacagatccatccaagctccccacactgctttgcctcaacggaatttgactcacttgccaatttccttcacaagacacagcaataacagcagaaaaatgccgagggatctgttcgccgaaaccccgtacgcgggcctgcgcgtgtcggaagaggtgaagcaccagctcatcgacctcgagaacgagctcctggtgcagcatttccaacagtacgaggagtatgtcgccgtcgacaaccgccgggtcgacgagcaccgctgggaacatttcaagtccaaggaagacctgcacgtgtacgaggaccgattccagcactcgcagtcctggaatgctgtagtgccaacgaagtcgggcatgcccgtgatgctgcgagttggaacggtccccggtcgcctggacgacctcatgtttggcgtcgtgaacccgacgttgggttccatgcgcattcaaacctcctacgttcacgacgtcgacgctgctgcgatcttgtgcccgatcgacgagccgagtgaagaggagccgttccgctcgctggtcatcaagtggctgccactggacgccagtctcatcaagaaggcccgcgacttcgtgtacatcgaggcgaccggcattctgcactttggcaacggtgaccgcgtcggctaccacctgaagcactcggttgagctcaaccagaccaatccgcagccgaacgtcatccgcgcaaacctctcgtactgcagcttctaccgacagagtcacaccaacgtcatcgacgtcttcggaaccatggctctcgggggcaagattgggcgttatgtatcggtccgagtcgctacggaggctctactttcgacctacaacctcgtgttctgcgcgcagatgaagaaaatgtcgtggatgctgcagcagcagcgctcgatggggctgcagagggggcggaacaaaagctgcgtcatgtgcaacaaggacacaagctcgggcatcatcggcagaatcggtaagagcacgtgcaacttgtgctacggctccgtgtgccactcgtgcaggatcaactggcgcatcagcttcatcgccctcggtggcaagctcgttcaacggaaaatcgccttctgtgcgacgtgtatcagcaaagcgtccgtgtgcgacccgaagcaagctgctagagaccaagctacgggttacggggcttacaaaagcctctcaaccgcctcccgctcggacacgacggaagtgtctaatttttcggtcgtctcgtactctgacccagcggaagtgtcggactacgattataggacttgtttataaggcgggggttgtgaggtagattactgtagtgtttgagttctgagagtgtgtgtgacggacgatgctgaaaggcagagctgacagaatgaaaaaaatgtgatgtttgcatttttctggttcgtaggctagcgttatgagcttttcacaggcaacacgtaataagatattgtcacttaacgatttcgactacatgtagttactcgaactactgctaccagggttaatacatagtgtgtgggaggtcagggtgactttgggtttatatcattttagttacttgcgtctagccgaagcaggaactttagtttatggacgccaatgagcacccagggccgttgcttatatttcaactagtacactcggcaagctcttacatttcgacctcacaggctacatgcttacatgttagcaaaacacattcctgtgtgtctcgatttgctctttgcatttgcaggggcgatagaaacaagggttggaagaacaaataccaatacaatattttcagcacggaataatgtgcgagaggtcgatgccgaggatatgtatggtttcacgatagcgttgcacgcgggcacagagccatttgtgcgcccacacggcgtcagcagtgcttctgtgtttgcggaatccgctttgattgggggacaggaatgtgtccaccgcagcggatatccgtgcgagtacgacgagagatatggccttgcgaatgctgcttaacagcacgatggggcggagactggaacatacacctcggggcttgttgggcttgggcaggcacacgagtgttccttcaccgagtgcgagggggtgccttgctcgaagctgcagttgacgagatctgcgaagagaggcgcgaggactgaagccccgtacttaagaagttctgctgggagctcagctggcccagcggcgcgttcgttattgaggcgccgaaaggctgcttcgacttctgttgctgtaacaggacgggttagagatcgcggttcacgatccggaacaggatgtagccgccccgggtcataaaacagcgttcggaagtgatctgtgatcaccttgttagtagtttgttgccgcaggatatacttaccttcttggtcgtggtttaacagcggttgggttcgatgggggctaatgtctcgaactgctgcatacattcgtgccgagtcgctcagattttcgatgcgtgtaatccgctcgtccagtttgcgagatgcgatggctcggcatcgcgctcggatttgatggaggatcttgttgcgggcggctcggagctcgatcgtgttagcggcgcagtcgttgtagattcgaagctgaagcgcccgctgggcctcagagagcagctgaagttcatcgtcgtgatgtcgtacgtggcggtggttaggacctgcgaatcctatagtcccctcggctgcttctcggattcgatcgagcgtgtctgtccagcgctggagaacggtgctgccttgtgctgttggctgtgaaagcgctgcctggagcgcgttcgtgtagtcgtctcgtgctgtgtcgtcgtagatgagatgatctcgtgctaacttgagtgctggatctggcttgaccgcgctgtagcggagacggtgagtggccgcgttcaggatgaagtcggcggtgacgagcttgtggtccgacgccgtcaacgttccaccccaggatcgtgcgtccatatagagccgtcggcagttctgagggcataggatatagtcgatctggttgtaaatacagtgattcgtctggcgctgaatccatgttgttttgtggcgggctcgcttttgaaaacctgtgttagtggcaaagagaaggtgagtagaacagaagtcagctaatgcgtggccgtttcggttgcgtatgcctcgtgcatgtggtcccatgaatgcctctccgttgatctgttgtccgagcttggcgttgaagtcgccggtcacgaacgcgatgttgcgccttggtagttggtcaagtgtgtcgctgagatcagcgtagaatcgatctacttcggcgagaggccgaccgctgtggggagcatacgccgtgacgatgttcacggggcctgcgtgggggagtaagagctgaacgacgccgattcgatcgcagtgtgcccaatagcagtgtaagtaggggcggacgcggggggagatggcaaagccgatcccgtggcgctcctgtacggctggtagtgtgagtagcgtgtagtctccgatacgtttcttgtcgagggtgcagatgcgtgtttcttggatgccgagaacgtcgatgcggtagcgccggaggtcctgggggagcgtgtcctgctgcttgcgggtcgaacctaacgactggacattaaacgaacctatcctaaaacggttagtttgatgcgcgcggcgaggagagcgcgataagagggtgggaggtgtagttgtcgctagtgctgtcggcttgggggcgaaggaaagacccgctagggacgtacagatgcccgagagcacctgccggaagcgcgtagctagcatcatgctggccacgcgttccgggggagggcgtcaccccaaccccaaccaaaaaaatactcccaatacaatgtcaatttacaaaaactaagcatttaacacgtttataattattgtcaataattgtgaaaaaaaattgttctattgacggatcccgtaccaaacccaaaatataataggatacattattctccgacctcttgattgaaataggaagatcgccatgcgatatggaggtgattagccattagcagtagtagactatactactacagtagtagtatattgcttgttggggacgaagtccctgtagtgtctcgcgaccctaaattgcttgcttgcttgagaatccgtgtttggaggtaaattgaattctgtattgaatggagccactgcggctgtcgccgcggtggtttctgttagtttctctttgctagtatgcctcataagtatgcagtatacaaatgctgagagtgcgccacgctctcctctttccgtaggtaacgcctctgcgaagtgtctgctggctacagtcccccttacattgatacacttcacttttacttagctctttcaagggtgctaaaaggagattgtcttgataaactgtttagtaaatcctgataaattgattcatccacttatatcggagcggatgtggataaacaaatagtaagttaaacagcagtgcattaacgacaactgatacagtgacatttgggtaaatgaaatccgtggtagcaggctgtgtggaatgccccgaatagctagtaggaattatgtgtttaattgtctattacgtaaatgcgtccccggggcggcggtgctaaacatcaatatttgagtatgttgcatttggtgtgtagacgacggcttgatttttctgttgtgcctacttctcatttttgccatacccctccctgcgcagccgaacgctccctagctgcgctatggataccacacaagcacgaatacaactgcccaatgcctcggattatgactgtgaccacgccgactaccagcagcggaagaaagcatcagttgtactattacgacgactttggctacagaactacgtctactcgtacgtctgcaacaatttcccagaccagtacatcgcggcgacgaggatgatcggggtccgtcaggttaggactttaggcctaagtcctaatgagtcaaattagactctcaaaaagttaagattaggactttcgcttgtttgacttgattaaagtatagttgtaccacaaattgacggaaaagtggtgcactatgctgaaatcaagttaacagattttgttctgctgaatgccctgtccgattgaggtcaagcattcgtgcggggcagctaacactgaattctctcgaggacgaccaaaacacgtgttggtaaacgaaaccatagcctgctcattgatcgatggcaatgaactccccaaaatcagcagtgcaaatacactacagcagggtttacacagtataaattgggtagactgagacgatgtggagccagtaagaaccaccagtttcatattttgcttaagggaaggggggttagaagtaatgtgggggcttttacgaaggtctgagcacgagattatactcaagtagcagtatttcgcccttgtcaaccttcaagtgcacatgtagccatgatatcccgttaggacttctaaaaactttatattattacttttcccgactaagtacgaaagtactaacctgacgcaccccggggatgatcatcacgcttaacatagcctcaccattcggccacggtgggacgacccatacttaacatgggaattagctaactcaggggctctttctagtgcgtttcgtgcagtgatctgaagtgcacaaaacatgcattaaccctttcgcggacaaaggggaaaatgcagatatggtctcgctgagtagggacagctggatacaactcatgtggctttagccaacttatctcaacgaaggttttggttgggttggggtgacgtcatcccggtagacggctcgagctgagtctcggcgccgctctgcgagcgctgccttcgggtagcgtctagtccactgcgggacatgtggggatgtcttcgtgggcaatggtggcaagctgtggccaaggactcgctgcgcagaaggcttcgctgcgcgctatgaccgggctcgccgtagctggtgggctgttaacggcatggcccaggaagatgaactggacgcgcgacaagaccaaggcgtagggcgcgcaaggcacaagaacagatactacagatcaaggtgcgaggctacgctggacatgctgaagaccgatgagcagacgtgcaaggagcagaacagatactacagatcaaggcacaagaagcggagtgttacatcgacggcagtaccgacggcttccagacgttgacgaagagacctgtgaaggagagcgacgcagcgagccgccattttcaccaaggacgaggaggagggagggggagcaccgagagcctcacatttccttgcggatgcggaaaaaggtacaaaccggaagtttacccagttgtgggtacagtagcggttctcctcgcctatttttgtacaccaacctagcaatatagagtctgggacggagtaactaggctacgcgaaacacgcaactcatttcatttcatctcaacgaagatgtacgatccacgagacagcagacctctaatataatcccatccgttctttacggtactcgcgctactgtattcctgagagagagcgaggtcgcgctacggcattcttagccgtaacacctatattatactacatgtacaatatttccacatgtgaccatatcgtggtcgttccgacatccctacattttctgacagacaggataaaggccaaagccagggcaaaatcggaaatagtgaaagatcggaaattacacaatatatacggtagattaggtctagggggcgtttttggtgcttccagtcagcgttcatgagaggctctcagccgcgaggaaatggcttctagaggcctgtaggccaagaaaaacggtattttgtgtattcatgcattacggccccgggagcaatgtgtgccggagcaggcaaattcattaatgaggccggctcccggacagggggccacaattagaagcagtccgacgccagctaactccccattagccaatctattagccaataggggacatgtatttaatgatgatcgttgattggttctctctacagccaatagatactcgcctcctgtccgaaattggtggctgctaggcattgtacgtcaccgacacgcggctcagagcgttcaatctcctttttattagagctactgatcaagtctcctgcacccctccgcgcacacatctacacccaagacaagacaactggccggccgccccccccccctcccaataccgtagctcaatggaagagcgcagggcctccaccctgagatgcccgttcaattcgggccggtgttattgatcacgatgggcttttgcggtcgtgtcgtgctgtgccaagggtcttgctgctgcgtcacagattgtgcgtctgcttcaagttgttttgcccgcgcattgtcgcgctgtggtcgtgccaggagtagcgacttctacgtatatatcggtgctgcatttgggtgcgcggtgctctagctcctgtgctaatttctgttctctgtaaggtttggggcactagcgacgttttgtatgtatacgtctaatacatgtattgaattaaccgagaaccgtattccagtgagcctacgcgtgcgtttgtgtcaggctctctatgatctgcttccgcatcagttttgcgttgaagcgcgcggaccttggacttgtgcatatcttcttgatatcgcttaagagaagcgtattcccggtttgaaatgcctcgaccgtgcgcttgatgaagtatagcacaaatactccgcagtcatcgtggtttatctgtgccgggcttgttcggactcctctcacgacgaacgctggtgctgcgttgtcaggatatttagttcgcagctccgcgtcgaaatatccaccgacaacttttttaatcgcttcgatgctggagattcctttcgagtctacatgcacaaggtatctcctcagattctgcgtagtgcctacagggttttgcacaatggcaaacgtccagtgattgcccatgcatataggtaaaaccacgtgatcgtacttctcgtacagaaatgttgcggtgataccgcaacagcgctcgtgcgcaagtccaattttttgctccacttgagcgaactcgctgtagatgtgtccaaatacgtttgcatccatgaaaaacgttcggccgtgttgcgggaggtgcactcggatgtaataggacataatcacatcgttcagccaattttggtctttaattgtccggacatcttccgctgtcaccagcaaacgcatgctggttttgcccacaacaaagcatggggtttgtgtttcacacacaatctcggactgcgatatatcccacacatctccaaaatcaaatgggacgctggccttctcactgtcatcattcaacagtgatatgacctccggcgacttaggtttttcggccaaagtcgacttggctggaggctggggggtttcggccaaagtcgacttggctggaggctggggggtttcggctagggtcattcacatttggcgctgccgtgccggtattctggagtcgtcgtgagatgaaagtgcttagattgtggcggtctataaaccgggtagtccacgaactctgagccgcgggtttgcactccgcaaagccaggtattgtcgacgcagcatccgcgacaacatcatccctgcacaccacctggccgtttgccacttttgccttgatccgttcaacaataccagcctcgtattgaagcgtcggaggggccatgcctggtggcgctgcccgctttgcggatggatcggcctgggacgagaataacttgtgcttgttagtcatccaacccagcaaggttgtccgagccacaccatgacgacgacccccctcggtagcgtcccatccatttcgctcgcatgcgagcaggatctcgatcttctccgcattcgtccgctgatctgagctcgacatcttggcaagaatcgaagtgtcgcgtttcggacaaactcgacatgtaccttacatttcattggatgaaatttcttaaatcctattggtcagaatgcgtactatactaattacgacccataaatgattggttgagaagcatgctatttagtcattctactttctgacagctgccgctcatcggtggctcgcgagtgtcgcttactctcattaacagcagtttcgggcttcctcgactgtgggcgatttcgggtttactcgagtgtgggcaattttgggtattctcgatggtacatgatttcgggtttactcgactgtgtacgctcggcggtttgcgacttcgggaattctcgatactatgccggtcaggcttgacgagccaaagctaatatgtcctgtgtgtctgcaggagcagggtcttgaattcggcctgtagcgaggagacgcttgtgggctgcgatgcgtttgtccaagacgccgcacttgtgcaggggacgcagcgcgcgcaaaacactgccagcgcccttcgcgttgatgttccgcgactttaggaagtccaacacggcatcttcagcacggcggtcggcgtccaagacctgatccttgtagtctgcaaccgtggggtcaagcgtaaagccgtcttcgaggaacagcttcatgaaggcgacgacgtggcgtgattcgggcttcttttggcggtcagagcagtcccagacgcgagggacacgggtgtaccactcgtaccatgcagccgacaggtgcgtaacttgcttcttcctccgttttggcttgggctcttggtctaacgattcctttgcttggtcttcttcagcgggtctacgcggctccttggttttcatctgagccgcctcgacaatcgtcaaccgtgcagctagggccttgtttgaggcgataagctcatgaatgacagctagaaggtgatcgatgcttggacagtgatgttggcttgcatcttgtgtttgggtttgttcttgtgcaggcggagcggcttcgctgtccagcgcgactgaccacccaagcatgtcgccaatcgggatgtctgcagcacgcaagctctcttccacgcgcgtgacaatggtggccgcgggtgagagctccttgagctgcgggtagtaacggaccaggtacgcagtgaggacactgaggaccttggcgcttacatttagacgttgttgcttgagacctgtacaggaattgaacaggaagccctgcaatcggccgaggcgttcttgactggtgtgatcaagcgtcgcgatgtcgatgaccgctggaacgtcgtctgccgcccacccacttaagacccgggccaccttccagtcctcgcgtgccatgttagtgatgtaggcgaaggccttgttcgtcttggtcatatcccaagcaccgggatcgaagatccactgggcggcgaggcggtcatctccgttcgcatgctgggccccgccacgccggaaggagtgcgaggtcaggtcaggggtggctcctgccggctcggcgacgcgcttgagcatcctgttcacgtacgcctgcacgctgtcttcgccgcgcttgacctcaccggtgcgtgcctcggttggggctggtgttgatgtttcttgtgtgtccgggcaggtttgcggcggtggaacagaggatacgttgccggccgcgagcattgaaggcagggacgactccgtcgggaccacagcgacgtcgagcgaagcgggctcggcttccagcagctccagcagcggcacaccttcgccaagtggcacggcgacctccgctacgagatcgggcaactgggacaggagtgccgcgcatggcgcgtcctgcgtcgctagcgctacggccagagcgtgcaagggacacgtcaagaagtcgctcttgtccgggatcaaggtaagaccctattcttctgatgtgttgacacgtagcagccgcgggtagaaggtgccgtctgccgatacagacacgtgctgtttttggatgtagcctaggtccgacgaccggccaaagcagtgccacatcaagcacgctattgctgcgtcttggtagtcggcgtgcacgcgtgctgtgttgtacacgtaacggactaaagactgtaaatcctccttagtacaaggtggagccttattaatcaagccacctttttcgcgtttcatgcaatgtttatctaaagtcttcccttgctttagcaatatcaactcagttggtactctcaagtgtggatacttgtcaaatagccacaacttgacatttctatgatacgctgttgccgtgttgcgggctaacttacctttcttaccttcgttggttgcgaggtagaagccaaagcggtccatcgtcgccgctaaacgtttgccggaggcatccaagagaatgctagcctcgacaaactcaaggctaaccttctcctcctccaacatccgcttgaatgcggcgacggcagtattccgcgccttctgcgtgttcgtaggaacgaaggcagctaagctcatgctgcttcgtctgctactgcttggttcttttaattgtgtggtcaaacgcaaagcctacgtactggttatcctatccaccgaccggtttcctaccataccatgacggtgccgacagcggcctacacctgccgacacaatctatcattagttgaaagcctgaatttcattgattggtctaaaacggctattttgaacccttctcgcattttcatttcgtggtggaggtcataatggcggcgctcctgagcgcaatagcggcgccgtgacctgcgctacgccctcccctccaggcttcgcgtgcatgtcatgcgggcgtgcacaggcgtgagcaggccccccaagatggctcgtggcaagcccggcatgtcgcgtgctcagtctgtgccctcggagccagtcgagagcgaggaggaccagggcacccaggacgcaagggcgaggggcagcaggcaccgcggggacaccaagtgcgcgggggaaggcgaggagctcaagagtacgaagcacagcagaggctccaagggcacgacggacggacgggcgtcgtcgtcggcggcggtggcggtggtggtggtggtggccgaggaggggggggagtagtagtaggaggaggaggaggaggaggagatgaaggaggtggagagagtgaggcaggccgcgatgacgctgcaggaaggagggaggtcgagcaggagtcgaagaggggaggcagagcgcacggcagtggaggaggaggtcgtgcaatgcgtcaaggagcgtggcggtcaccgctgaggcagccgtggaggagaggggacaagacggagcggctgccgcgtatggtaaggagaaggggtgcggcgaagctgaaggaaggagagggcacggctgaggcgagcgcgtggcgtactcgagtcgtcgagcctgctggcgtccgtggacaagggagagtggctgtggtagagggcgagtgtggcggggacgaaggcgcagtttgcggggatgaagagcgggtggcctgcggcgaggacacaagaaagcgtgcgaggagctggtgcgtctcgtggcgccgcagctggtcatgcagagctgccactgcgtgcgggtgcattgtgtacggttggctgggtggcatgttgctgggacctgccccgatgccctcctagctggagttaaaccgttaatactaattaagtatctatttattcaagtgttccattgcgtcacctcctcctacatgtacatctccacgataagaaacttgcaaatactacttatcgcataccttgtcgttctgctaacatgtagtactagtactttgtagtggtaagttcatgaaagggaatcgccacggaaactcggttgagtttgagaagctagcgaaagcgccactacaaaccgcgtaaagcagttaaattcaagctatacaaactttacgtaatgtgtcggcagcgtgcaaaatgtgtataatattatgttacttagcctcactatacacggataacatatatctcgacagccctgcctacattatacgtcggcaggagtgtcggcggctcatacacctacccctagcgttgatgattggataaaataccatctatcgcccttctcattcgataataatcgatcatcgacatttgattggatcatgacagctgtaacggggttacacgcacaagtgactttagccacttgtgactctaacagacacgacgtctgttagaggttcgaaagactttctcgaccttggttgggggcgaagtccccttacattgagttgatctctcaggggtaggggagacatctgtactggagactcgctttaaaacgaactcaaattttacttgggtttaagatacatttgtccctctatacctaggggttcaatttatacaatcctaggttgtcctactgtatcagtaaagtggaggtacaaaattcgacatcagtactggctaaatactgatcaccttgagattaccggtatgtccaaatcaaggtgcggagctgcgagcgctcattcagcaagatgtggggcaacgcaatgcaatgatttacgtgttcgcgtagccaaattacacctgcgctagtctcagtttaaagatgtggggtatgaacagttattaataagtatagtagagaataaccaaggagcgactggtgtgccgcatgtgcggcgcgcccaagtcgcttccggaaacagtcttctactacacttggattcagatcgactccgggtcgtggggacgtcgtaccgtagtggttgatctaaccactgtggcgcgtcgctcctattagcagctatacagatgctcagctaatgtaaggtacactaatggctacatacatttgggaccaccacgagtcgtcgtggtccacgacgggtggttcatttacatttaggattcctattggctgaaagtagcatcttttagccaatgaacgacttgcctatttgcaggacttgagcaaggttgcattaggtgacctacctgtgatgcatggtacctgatcttcttgccgcaggaattcataaaaatcgggaaaacgggagcgggttctgaaaaccgtggagatggtcccagatagcagcacggcccctgggactagctgcgcccaccgcagtttgctgcacagcgctcgattcttcaacgcgtgttcaacttttcattgtccgttttggaaagatccaacgatagtctgctacttggccacaacccgctcgacctttgggtagcccgtgtcaccgttggcacggcatccaacacgctccctgtcagcttcagctcgtacgggatgtccatgttggcataacctccactaaatatacgcatcatgtcaacacgtcagatcaaataacaacaagtagcatccaaatgcaattgcataccttcgggtgtgtgtgtggtggcgggttgtgtggggggacaagacgagaaggttccagcaccagttgggcatggagcaattcagtctttctgcgcaaactaatcaacgctaaatgttagcaatagtccagcacctcatgatccctagaaaccgcgccggagttagacattatgttgattaattaccttgcagccttcatcaatgtctcggtcactcgggcgaccgtgttttaggccagcggtgagcttcatgctgggggcttcggaactcggtagcctatacagcaagaaaccagttcaccacccgttaccacagtataattaggagacgcaaacagtatcgcggggtgcatgtaagcttacgcagaattcaaacctggctgcttctcggcttacgtgtgtagacatcatccaggactcgtttcacttctgcctctgttgagtagttgcacgctaataagatgcataatagatcatggtaagcacgacaggtaaaaacagacagacacgagaattgtataccggtccctgtctttctcgtcctcgctttggggatgcttgcgattgaagaatgcctggcattggaagcagctcatcggcggtatttatcctatctgtttttctagttaataggaatacttatatggttatacgtggaccaatcaaatgtgtttgatatgtgggaagaagggacgacgatccacttttgcggatttcgggctatagtgaactcaagttgttgttatgctgttctggatagcataagacatttttgaacccatccgcgttcaaggggttaagtaggcggcaattgtggtactgtagagtactctgcatgcccttttattatcaaaccctgtccagaccttggatgtaagcaaagcccatgctacggcatgtgtcgggcttcttcaggtattactgcgtacctacgtagtacaaaatgtgactaacttggttacgtttttgtatactttgttggggacgaagtccccccttacattgatgcactcacttttacttagcttttatttacttacctgatatcagtttagatggaacgggttagggctgacattctgattgagccgcccagggccatttttgaccaaaacatcctgtgtttactgacatttgcagaattctaacgtggataggatttgagatttctctgcataaagatgcggattttagtgaccgtatgtcattaaatcggaggtacacgaatcagagggcattttccaaacagagaatggctaatctggctcagcaaagggacgacaggtgcaactttagctaaaatattacattttattggctctgatgatgtgactggacgcctcgttgcatacgttcataccctgatttagagtggagggaacacggtcagcaagcttatatacgggagcgtcagactcagtctcctacagtttatttaagaaaataagattggacagcttcaagggatatttatcaaaaccccaaacaaacacgtgagcatttatcaaaaccccacacaataaggataaggtgcattcattggctaaaacacttcattcaggttgtgctgaggcaggcatcctgtgtgtgacagagtgccacgtcctgcgggtgcttcgccctgtgagtgctgacgaaaacaagccaaacagcaacagttaagtcattgtgcatagcgaaccatcgttacctctctgccttcaccaccacgcggtgcttctgtaggacgctgccgttcagctcttgtatgacgctgcactccaccactcacgggatgcagccgtccagctctccagcactcgatggacgcagcgctcgcaacacacagggcgctacacttcagcactcacagggcgaagcacccgcaggacgtggcactctgtcacacacaggatgcctgcctcagcacaacctgaatgaagtgttttagccaatgaatgcaccttatccttattgtagtgatggaagcgcagaaaaaagtgagcggatcagtagcgctcactcggagcacattcccgcgcactcggagcttgctcccatccaacactaccttattgtgtggggttttgataaatgctgacctgtttgtttggggttttgataaatatcccgcttcaagctcgtgcccaccaaccagagcatcattgactgcagtactagaagcggtagtgagcggttgcgaggagcgtagccgcagcaaacccgcgcggggtgcccacgaagcagggccgcgcggtatttgcgttggcgggcccagcgacgaacggacccgttgccccaactcggagttacttttctattgcgggggtctgggggtgcaacccccagcatgtaaagctcgcaatgtacttcttacatgcaatgacgagttcttcatgcagttctatgataatagtgttcctaatcgaacatgtgatgtcggatcggaagctgcaccgatctgcacgtgatggcttagacccaattaatcaatagcttcattagatcgattgggagggcggggacgtcggcctgcagttgagattccactgcagggtgtcggcccctccctaagcaactcaacggagcaacgcgactgagatgctccactactagtatatttacagttccattgaatgaggcggctctgtgatccttactaaggtaacctttagtactgaagataccttatagaccacgcactttaccttgtttatgtggcattttgcgtggtgcgtctgctttcacagcacgaattgtgctgttcgtgaatcgcgtttcccaagccaggtgggcatcgcgtcaccagccaccgtacttcttacagtgtacctcatttcgcaattcgccgtccagcccacaagcgcttcctttcgcggtgccaggaatcgaccatgcgtctgtcaactatcctctcagtagtgtcggtgctcacgcttctcgcaagcagctgcgctctctctgcggtcgtggatgctaacgttggcgtctccggacgtcgacgtgctggatgtgagccgtaacacgaggcccagaagagattccaacgacaagaggcttaacgctaactacctcagatacgctgcttggctcgataagcacttctcacgtatagatgacgtagtggaaacaacctgtcgtcttcacgaaagatctggcgaacaaggagtcgatgctttttcacagcgagacagcgaaacgactctgttcagggcgtggtgcacaagaggattccagcccaaggagatctccgcgaggctccacaacacgcttggtggtcgcgacggcacgctcttcaagaagtacgaggcttggctcaaaacgcacttttcggccaaggcgtgaactactcgttcgtgaagtacacgcacatgcgagcactacaggctagtttagttgttactgtacttactgcgaaactgcatccccgtgctgaaaaaaaatgcaataccttgtactacgtgcatcctaccggtcgagttcgagagtgtgtaacttagagcgtacagaaatgttatgagcccagcacattgttttttgtgtgagattctcacgaaaaagaatatcacacacgtatacttgtacgcgcttttgcttacataattgctacggagttttatctctgttgttctgtgtggatgtatcaaccgcgtattgcggctgattccgctactccattcctccagctagaaactgctgcaacttgatgcgccgctcctccaaactgtccgtgccgtcgatcccgaaatcttcgttcaacagaatgctgagctcactgatcctgcggtgactccaccgtctcaacgacgtgtagttcgcgggaaagtatcgatgggggacaacttcacccacgggtagtcgggggatatcggagtgcggagctggtgcgccagggagcaaccctccgcggcctgacttggtcttgacgaatcggcgaatgctgcgcgccccgccgtgaactgcagcgtcgcgaaagactcgggcgttatacgctgcggcccgagtgttgtgaagaatggcgtcggtcttttgctgctgctcttggaggcgagcaaactgccgacggagttgtgctgactgctccaccacttgctcaagctgctcttgctgctgctggatcaggtgctccgcgtgctgaagccgctggagcattcggagctccgattgcaggacgtagtcgtggaagtcctgctggatccagtggtcacgttgctggatctgcagccacaggtcaatggcccactgtggagggggatcgagactcgggttcatgagtgctgttttactcctaataagcttgtggcctttggctccttttgatgaatgaaccatcaagggtacttaagtatgtaaagctgttacctatatctgaggtcatgttgcgtcgatgtcaaccgttgccaccgcgagagacttacaggtccatcgtccgatatccaggctaagtacgatcattttccttattccaagatgtcgctgactgccaacaggatgtcattgagcgccaaggaagaggtgctgtgtgggcctacctagccaaggggtcttgaactctcagtggcagctcgccactaacaagtttgcgcaacttatgaccccccctctaggtctgtatcgtggacgaggagaacaatgtgattggcaaggccgatcgcgcggtcatggtaagttggcagaaaagtaaaaatatttttattctagtgcttattatcggtacttgctgaaacccgtcaattatgtgtgtttgcccccacacagcgggcgttcaatctgccacaccgcgcgtcctacatcgtcatcaagaactcaaggtccggaatgatcctttcaattttggagcaccctgaagctgacaatttattgctgttgtatgtttttagtggcaaattctacgtgcagcgtcgcacgatgatcaaggactactgcccggggatgctggacccgatgacgggcggagtggtgcagttcggcgagcctatggacgtgaacgccgagcgcgaagccgaggaggagatgggagtcaagaacacccctctgcgctacctgaccacgttttactacggagacgaccgcagtcgcgtgtggggcggactctttgactgcacctttgacggcccgctggtgctgcaggaagaagaggtggacgaagtgctcacaatgacagcggacgaaattcttgcgcgccgcaaagagttcacccccgacggcatcttcgcgttcgaaaagtacctcaagttcatcgaagctgaaggcaagtaaggtaaaagaaaaggaaatgcaaccgaggaccagcagctttatcgagaccgacaaaccccttggaaaaaaatacctgtaggaagttcgttgggtatcaaaggcaacagcttcagatgggcaccaggaagacaaaaacctgactcccgggtagtttcttgacctcggctcaatttgccacattttgtaaggcttgccaatgcagctgcgccgcccggagcgcgcgggcgtgacggcgtcgctctcgggccccagggctccgttatggacgcaacttgatgcatctgctccgcaggacgcgcgcgcagaaccacacaacgcggcgttctctccggcggcgcgctcgggccacgccatgacgcttctgccgcccaccggtagcgtgctgctcttcggtggcgccgacggccagatcttcttcgaggacgtgtttctactggagccggcgggctacgcgggctcaagttctaccagatccacgcgcgcggcgaggcgcggcagcgtgcggggagaggacgcgccaggacaagcagtcgacgtgcagtggaagcggcttgtggtgtcgcgcgggacgtcgttcaacggccagtcgccgcgctcgcccatgttctccagtgccggggccattggctcgggcgtggagcggcgcgccccctccttcttgcacgccgggggagggcgggactatcactcgatgcactacgtccagacctcggcggcggaggagcgggccaagggcgtgcgggtgctggtgatcggcaacgtggtggtggccagtgacgaagttgcagctcaaggtggcgcagacacacaggcggaggggggagctggggcctttgacgcgccgaccttgagggtggaggagctgagagtgaggcagccgctgctggaggcccagtgggaagttcggcgcgtggacgactcgagcatgtggaagcccagagccagacacgctcatagcagcgtcgtggtgggaggagagcaggttttcgtgtttggagggaaggacgcctcgagctcgacgtttttcaacgatatcttctactacgacgcgcccttgaaccagtgggtgaagccgacggtgaacccgacggggcagctgccgcaaccacgcgcgttcgccggcttgacggcgagtgatgatggcaacacgctgtttctctttggcggcacggacgggaagcaagagttcgggtcgctgtttctctacgatgtggccaactcgcgctgggactcgcttgcgggcgcgacgctaggagaccgaccgtcgtgccggatcaaccactcgctcacgtttgcggctccaaatcacctggtgctctttggtgggagacggcgagctctgcgtcagaatgaactctacatttacaatgtgaacacgcgcgcttggcgacttgttcaaggcggaccagctgaaggacagagaagcagtcgccgcagaagtagccaaacggctcttgatgataacccccccactgtccgaacagcacatgctacggtaatgtttcgccccgaacctgcgggacctgaagctgtgcagaagttacttgtcttcggcggctacgctggctcgcatcagtggctggacgatctgcacttactttccttaccccaagctgtgttgatgcagccgccgcctccaagcagaaactcctctcgatctattgcagccactcgtacgttgatttttatctcctggacgctcatttatggtatctaacggcggtatcgttgtttcatgcagaacgtacccgaccggcacgatcctctttcaacaaaagcagcgcggcggctcgactggctctctcagctcctcagcaacccgttcaaatgagtcagtcttcgcagtcggctcgcctgccgccagaggctacccagtcagagggccaactcgaacggcctgccccacccgtccaggaacccccaccagtctctcaaacaacgcaacccctgcaggagccacctccagagactgttgaatcagacaatcggcctgacacagcaaatgcagagcagtcttcgtcgttaccgccgcagaactctctgacatcgataacgcctgccagctctcctcctcgacagccaccacgggaaatctctcgatcggatacactgcaacgaccaaccacgactttcaccggcagtggcgtcctgacagacatcaccaaccaatccagctccaacacacagaaacaacagcaacagccagcactaccacgctcctcaggcaccgccactacgggaggggatgcggcctcccctggtgcggtaaaaaaacacaaacgccgtcgacttgtagaggatagccaagacagcagcaatagcaatagcgtgggcagcagcgggagtggggagctgactacagcgcaggtggggatccagaccacgctactgcagctgctgcaacaccaacctcgagtggaagacactcttgcgcgtatactgtcgatgctcaccagggagcaaactgcacggcagcagcagaacatgagtcaggagacgttgatgcggattcacagcgaggagcagagtaagcgtctcgaagctgcgaaccggagaaatgaagcattggaaggacgtctcgctcgctgcgaagccgaacgggtttcgctgcaggagaaactgatggcacgcgagactgagctgtacatgcacaagcgcagcctcgaagcatcaattccacctctgaacgaacgtatccaagccatcgaagcttcccacatgcagcagctgaacgtgtcgcgggtcattgaatccaagatatcggccgtccacgacttcatggatgaactgcgcaatgctggcgtggaaggcacagaacgcgacgactctcctttgcgacgtcaagggtacgttgcgtttgcgctctgtatattgcatgtccccagggggtctgctcgatgcggcgcggcatgaattggagtatttttcacgccgcacctagagctcagcttgatgaccccctcacatcgagcttggagcctcgcgggctaccatcatgatctcctgatgactttggagggctagaattcccttcaaggacagatacggatcgtacattttgactgatgattgtgaagaacgctctaataacaaatgtgtgcttgatgccgttagccgtcttgacgacagtgtggcaactcagccaacgccatccccaccgaagccgctactatacccgcagcgtgtggtcctggcactggaagagaagattcgagtgatccagtccgagaaggaggcgctcgagagccaggtaatgtgaaggttgcttgttcattcttctgctttagtcgctcataatacgtggtgtcttcataggtcaaggagatgacggagaagttgaagcgtgtagaagggagagaggcacaggcgcggcagttccttttctcgtggtgccagggcggcaacccaccgatgccagcttgcaagcaaggtcagttgagtccgaggctatgaacactagcacggataacttgaccaacagtgtagacagctaagaaggtgtttgtgtcctaacctaacctattgataataatcgaaaacttcacacgagacaggatacacaagatctattacggagcggtcttggggaagttcatctcgttcaggatgttgctcgcaggtccagcgtggccctcttgagatgcaaacgattccagcaagtttgacagcagattgtagtccaggtccagcggtttagaggacgagaaggacgcggagccgacatctgcgggctcatcttcttgagctggaggcgaagcttccttctcgtcgtcctccatttcctcgaagcgcgaaaagcttttcgcgaccttggtgcatgccaactcagcttccatttcggccatggcctcgtccagagtaaggttttcatcatcatcatctccctcctcttccgactcatcatcgctgtcaggttcatcctcatccatgaagtgtccaccccatggagcgtccaaacctgcagcactcttaccgccagcctcgtgaccattcaatatgtccatgaaggagctcatgtcgaactggataggctgtgctccttccacaccctccacacccgagactccttccacgaacttgccaaacattgcagccatgttctgcagctcgtcggcaccaccaggacccgaagcagctccagccatggccgcacgctgtagctgactttccagcgtgtccgggtgcatgtacaaccacgaatcgtcatcgtccggctgaattggcagcgctgacagcttgacgccatgctgctgaagagcctcgtcaataatatgcctccacgaccgtcctaactgatcttcaccgtcgcctgcatacagcatctcaagaccgcacgccagcttaacgccaatatccgctgcctgcgcgtccgggtgcgtgttctcttcactcatcgacttctccagaacccgatagcgagcatctcgacgcagaaatgcgttgggcgggaagaactcctgctgcttgagctcagcaaacatagctctcgaaaacgtgaccatgtgctccacaacattctcaccttcgggcaaaaacgtagccatcttgccgcacaccaggccggcccgcttcggttcacggtagtagaaagcctctaccgccggccccaccagctccccattcgctgcgaaaactctcgccgctctctcaggcagcaaacaccttactcggtggcggttttcacgcagatacgttggtacctccttcaacttgtgctgaatcagccgctgcacggccgcgctggcctccgtctcgacacctgaatccagcacctgttgcagcgcgtcttcatcgtataaatccccctctttacccctgaatcgggcattgttggcaggcggtgcaatgtgcagcttcccatccaccacaaacactcggcgatcactgtcctcgggcgtgacccaatcgggcagcgcttcggcgctctcaatgagcagaaactctccgtccgagtcggcgatgcggcccacgacacctgggaactgctttgtgatgtcgaacacgagcttggccacgacccactcgtcctgaatggcatcgccgacactggtgcgtccggacagaacataacgcccacttttgtcgctggtcgcttggaggtggaagcggtgcttgtgccacaggaagcctcgcgtctgctgcgctgcgaacgccaggaacgcgctgcactgctgctcggcagcttgacgaaggtcttcattggtctgctcagcggtagatgcgggcaggaagaagcagtaacgcgcctcgttctcgtcgacggttggcggcgggaagagttccatggcgagtcgattgattgactaatgactggtttttgtgtcagtggcgttatgttgtgtcataacttcaaccttgctggaatcgtgcaacgcataagctgattctgctgtacctgggacggcaacgcactacccaaagagagaattgagtcatggattgagcaaccacgagtctgataactgcaaattgcgcgtggtgattttctgtccgtcgtagagttggtggttgctagcgctgctgactggtttggggtctccgtcgtgaagcgagtcttgtactgctcattctccattctgctccatcccctccccacaagagcaatgaacctcgctggactcgtgcgcctgactgccatcgcggccaccttcgcggccaacgtcgatgggcagaccacgttcgacggcgacaacctcccctccagactcaactaccaggactacgtctcgcagttcctgacccgcaacgactcgacggctgccgtcgatatcgagccgctgatcctcggtggaggcatcgtaccccccgggaccaagacgtacactaccggtatccggccgtcggccaatgggacggacttctgcggcggcgccctcatcacgccgacgcacgtgctcaccgccgcgcactgcatggctggcgacatccagtacgtctctgtgggcacgcacttcttgagcgggaccgaggatggagagcagatcaaggtcgtcaacaagacccgccaccccaagtacgcgaccgagaccaactcgtacgacttcctggtgctcgagctggagaaggcgagctccttccctcccgtcgcgctcgccaaagccgacggctcggacgtcgccagtggcggcaacgcgacagtcatgggctggggcgccgtcgcgcaaggcggcgtccagtccaacgagttgctgcgcgtcgacgtgcccatcgtcaacaataccgcctgcgccaaggtgctcgacgtggacgacacgatgctgtgcgccggcggaaagctcgacatggactcgtgccagggcgactcgggcggcccgctcatcctggaacaggcagccgaagacgtgctcatcggcgtcgtgagctggggcaacggatgtggacgtgccggttaccccggcgtctacgcgcgagtgtccgtcgctcgggagtggcttgacacgatcgcccctggcgccacattccgctgactttccccagcagaaattcggctttcatcagcataaagcccgtaagaagataaacccgcgagctttaacaacaaatgaaaccaaactctgcatatccagtcaacttgctgacaattttgattgccatccagtgctctataataaatagagcaggccgattctcttgaattcgtgtgcgtctgacctcatttttgtatcaaaacttttgcgtttcctgtgcgtctgcgcgcacacgaattctttttgcccgcgacgacctttccatacaaactgctgttaagctggtggaaatgcagagtcgtaacgaattcgtgtgcgtcaaacgcacagaaaaactactgtgaacctcgaaactcaataccacacaggcgcataacaaccgcagtttatacagccacaagttcgaggcgacaggcagtagtgcgtcgtcgcgcattgcctttgtataatgcagcgtgaacccgtggccaggcaccctggctacaccagcgcccattaggctccatattactcgtcctcggcaactgcatcaacgacgtgaggtaagacgagctgaattatcttttgcttatatgcacgtgtgttggtgtttcgacgctaacctacgcgtcttggctcgatctactgcgattttctcgaatctcgttcaatgcagtagaccatttgagctgatctttgcgcctttgacgattttttggtgttacatcgctgatacgaagcttcggaatagcgccttgaagcatttcgcgagcctgctgcaccgttggggttgatatccagcagcctcgcggaactttggcttgtatctccatcatcatacaccgataggctgagagcgtcttccgcttcccgcaagtggaaaggtcctgccactgcaggaagcgatatggaccaattcgcccagatgggtcaccacagcaccagtacaccttaacggcatgctgggaatagtaaaatcagcaggtgctcgcgtcaatcttgagttcgtaagagtcaggttttgtgtagccatttggactccatcgttatcatctacatctaggcggtcctgagaatcctctgtagtgcaacccaatggctggggtaaatggcttcggaccgctgcaactagctcagtcattaagcgcccgcgatatactggcattaagctctgttgacgacaaagaagatcgacaacgggacatttcttctctcatcaactgcaccacagtgggcgccagctcactaaccgacaatgatagctgctgtagctgcgccgcttgctgctccatcgatgtcatcaaatgaacgtgcggaggtacaccagtaggccttattcgatctgatggacgtgctgttcggcaaaccactttctgttgcaactgggaaactagtctggtatttccgaaaagcgcgttgcgatacaatggatgctgctcactcagcgtggttcgtagatattcagcgtgatacactagagacgccaaaagaaagccgccagcgcgtagtaaatgaggtggcaaattgtcgaaacataaatgaatactatcgtgaacgagatcatcaaagtcgggggaaaatggcggtaatatagcaaaaccagtatcatcaaacggtaagccagtcacataacgtccaacaatgcgatcgccagcagactcgtaacgaatgtaggtgtcctgcacaccgggtagcttccaaccagctctgatacatatagccgcagcagagggacccccatttgagcacgaagaaacaaaggtcgctgaaccttttcgcgcggaatgtgttccaatatctgaaggtaccaatccttcattttcaagcaataccttcatctcgtcttcctgcgtgacgcgctttaaaatctttgagaatcgatcgtattggttaccaccggggaatatcttagaatcgtcgattcccagtacagcagcatacatcgctagcgtaacactgggcagatttcagggacaacggggttcgcatacacgtgccttgcatcgcgaggccgggagccgtcttggtcgtttttcatgtgcccgaaaagaattgcgagcgcgtctccatcccagctcatatgaccggaatgaattgaagccgtgttgcccgcgcgacacatcaaattccaactcaacagtagaaatgcgtgcgcaaaaagaaattcttcttcaccatgcttgataaacgcagcacagagagagcgcaatagcgaaaatgacatgggctccttcctctctgtcagcttcacaccagcatcgtggttgcgccgcgcaacagtgcgtttcaggcctttgaaaaataccgtcaaatcagcagcaaactctggtgtcatcgaccgcccatatcctcgatacaaatgaaacaaacttgaacgcatcgagtcgtaaacggattgaccaggtttatctccgctacggttccgaagagacagcaggaactgctcgaagtcgtcagcgcgatgctgatcatagttaataggaggtaccccaggattctgagtcatgaagtcagcaatgctgctctgttttagcgacgtcatctccaactcgttagggtcgaagtcgtcatcttgcaaggctccaagaaatgcatcgctcagaacatttctttggttcttgtaaagccatgctacataacgacatattccacgaacgtacatcttcacagtcttctggccgatcacattgtgcttgactgcgtgtacctgactggcgagatccgcagcgtccgggttcgtgagcgtgtcggcattcggacccgtggtcaatgtggcgtctgggctcgtgggcatgttggcgtctggatttgtggttgtgatggcgtctggattgatgagtatgtcatgaccaaggcggcgttcagattcgggggcacgatgaacgtgcgcccgcgggcgcctggcgcctagctccaaaagtcacacaccacttcgattaagtacgatctcaggatagtcgcacaaattcttgctacatatgagttttcgcagtcactgttcctggtcctgttcgggataaatgtgtatagaaagtacattcggacctgctcctgacagtccggggaatactggatgactcatccatcaacaaactaggatattgtgcctaatgcccatttggacttgaaatcggcactttggaaatcttcaattaggcaccatacaaagatctatatatcagtatggtaagtgaagcatatgatttagagaatgtgttctacaagtcgctatcaacagtgtgttcctggcaagagatatattcatgggaccgagtgttaatcgttgtcacaccgggactaattcacgggtagtcccgacactgcgtcgatcaagaatttcagtctgtgtggtggtgatgccaggtccaccaagctacagagctgttgttacccataatatctgataaattgcatgatgcgcaacagagcgcaggtacagtgtagctgttccttggtcgttcggtggtatccataagccaatgtaaggctacgaagatttgataataagtcgactgccagattacatgtagttaatttactatttaaaatacttcctacggtatattggtctgttacgattgcctggtcgatagtgtagggcgtttagctgttaatgaaagttactagacactacctcactgttagctgtacgtttgctgactgttagttgacgagttaatagcaagagaataatcatgatatatattaaccttaaggctgatgtctttcttacctacggaagagatctaaacactctgcgcccttgagacccgtcttctagcgaaatatattcgggccaggccgaattcagctctgcgtcttcaaactcgtcgatcatctcgatcggagtgtgacgggccaggttccaggtcggtctttcccaccctacccattttatcaagtacagtcgctgcatatcaacagtcttacgtgcgtagatgttttcaacaacaaatacagcaccgccatcgctgctaatagaggatctcgcctcactatcagttctgtccgcacgagttggtacttaaaaactaaaacacaatttaacggatgggactatccgttctagactggcacttcaagtaactgcggctctggcgctgcactggcatctagagtagacttggcagcatctaatgcgacagtaccgttgagttgggacaatgtgggccacaatatcgaattaaaagcgtctcatttcttaaaatgtagaaaaccagaaggatcggagcgcgtagataaagttattgaagtgtaaaaatctttagtaatttccgtttttgtgggtgctcgttcggcaaatacatgttagcaaaatttactagacactaactaactgttatttacacgtacagctgactctacagttagtgtatagggagaacgctactggtcgacccagctccatctcataattcggcagttacggctgcagcgggatgcgctgtcatgtatgagagcttcattggcgtgccaaatgcacagagcagagggaggtcgagctagcacttggcgcgaagcttgaaggcatagtggcgaaagtaacgggggggagggtggtggcagtcgacagcggcgacggaatgagtggttctagtagttctagcccagtcgctactgcgctagataagataaaagcaccgagaaataccatcaatggaccactatttactatagatccgagcctgaagccattctcttaaacaaggatttttttaaaactccatttggattgtttatgtaccaagcacctaccggtagtttgttgatgcctgtctatgagtctgttctaccctcatcttgactagagggttggactggtagtgcttcccgacggtgattgcaccgttgtttccccgtcaaccccctggcagccgaatggcaggtagacgtacaggaggtcaatttaaccagggatagcagagtcttgcgagtgcaccgcactagctacacatttccgctgttgcggcgacttctacactgcagataccaaaaaatagcttgaacggatccacgcagataagtacgaagaagatggtaaatgaccaagcttttcagtttaacttcaaacgttcattcacagagttacctcaccgcagtcttctcatctacgcacagacaacgcatctacagacaacgcatcaagcggcgagctttagcggcacggtggcccccgctctctaagggcacatactcgctgccgtgtcgtcggactatagaagccataaagaaccccgcccaaatcgataccgcaagatatcatcttctgccttcatttgccccctgtatagttgtataatttaaatacaaagtcgtaaaacacctgcaatacatagaaaatctgcgatgtctatgccaaaaacaaaaaatataaggaggttgtacgtgaaatttgtattgaatcgatacctaccttttgtgtggacacacatattccggtccgggaattaatccctgttgggctgtacgtactactgccgtggcactaccaggattaattgttatgttggcctttcaagccaacctccgcaactcgttggttgtacaagcgaaaggttgagtcagactggttactggccgtggtggggctattggcgtcatactgtctggtgacagagttattgtgtttttgctggcccagcacgctggggcctagcgagtagccactcaagttcgaacgaaagctgaagaccgacagattcagtccacacagtcgtggagcttcttgatcctatcctgtacacgttatggcagcccgcccttaacgttgacgccaaccagtttttcgccggacccgttgcctcaaaggggtacaagatgcgttgatacctgcctcttgctatttcatgcggttcttgccgcaaacataatcaatgcttcggcacggtgagcaacacgaagcccataaagcgcagaccctgctttcagaccgaccttggctcaggtagcatctttttagctgtagatattatcatgggatgaactacttgtgatactcccaacaatgcgttcatttcgttcgagctgtggtgggacagaaatgaaaaatgcattcgagttgggacatgtttaggcagctcaagcggttggttcttccagatcgacgccagtaactctgcaggtatgtaacagcacgtttgaaagctgcaattcgcttagagtcggagataaattactcaagtactatcgatcttgttgcctgttgatcacgttagtgctgaggaaagtctgttagtggaaagtgtttcgtgcgagaagtcacgcgcacgaacacacctccgtaaatggtacactgtacatacgacaccatttcctcaggtaatagtttctctctcggcctcgtattcttgatgcgttcatttctggtggcgaacgacgctgcggtgcgaacggaatagatttgaattatgtgctctagtgccaagtactcgttcagctcgttccagtggtgaatattttgccctgtggacatcactatacgtgttcatcgctgtccgatgtcggtacggtttggccattgtccgagtttgctcggagcgcaatgatatcgttcgcctgtgctttattacgttatggttcgaacaatggtacagccatgtcagtttagctgagttccttcaacttcaaggaaattttcatgacgtattatcaggatcgccgattcaggaattgcacgaaagtatctaaagcagtcaaaactcacacttggaagcacattttgaatgctaggaatgccttgttgatggcgccactctcatccgccccaaggatcctacatccgttactcgaattcctccaggcctcatgggcgttgcatttcgatggcgacgagcgctcgagtcgaggcgttcgtgaattccagtgaccgaggatacggcgcaaatatttcgcagcctgtgcgcatgggggacgccgacaaaggagaggagatggagctggggagagtccttgggcgtaggagctggccagacagcggggtgaaccggagctccctccacccaccaagtttgaaaaagtctccgccgcgcacgaccgatgcgcctgtataaggtaatagtggccgtcaatggagcagtgcagactatcgtcgtcgggtcgcggcggcgcagtcttgcgcaacatgacaattgtgtctgcacggatgggtggcagaaatgattgtttccggcaccccgcaacgaaagtgttgatacaggggccccttgtgcgccgacacatggagcgcttcgatcctgcttggcatcttgctgcaggtgttggaaccgtctcgatgcaggtaagaaaatccattccgcccctttgaacgccacgccatcgagcgctgctccagcggaggggtgtacaagtaccgcgttgataatacagcttttcgttgcgtgagcaaaggatttcagtgtcggaaagagctggagcgtcttatttcggccctttcgaccagctggaaatcccctatggtctcgacgcgactgccgtatctcgacgatcgaggacggctaactgcgtactgaagaaagggaacgtgcagagaaataggccacgcatgtggtgcaagtgtcatgtggtccagagtatcctctcttccgctggactcggcgtccagacagggagggcaacttcaagtcaacatacgcgcgagtggagcttggcaaggccagtgcgagaggataccggccgaccgagtattcggtgtcgcccccgcgaccttatggagctcgggctgcgtcgtggcaacaatgtaaaaagcgcgcgttgactcgatcgcggcctcctgctgctactgctgcttatgggcagcgaaacttatggccgcgggtcagctgggcaagatgttgagatgtacgtcagacatggcacataaacgttgacgaacttgacggctggaaccccatcgaaacgtccggcaaccacgagctcttaacctctgtagccgaacctcaggcggacaagaagcagaggctcatttcccaacttcctcgtgcaagcacacgttgatcgcagcgctttgactcgtactactccgctaaacgcaagcaagccctcaccatgtcactggaacccctcccagtattcgcggcgcgcgccaccgacgacctagagcccatggacccggagctcctgagcttgatcgctgccgacgacgccgaatccaatgtctcgatggacgtcaagagcgagcccatcgtcgacgacttcacgccgttgaacccgacctccaccccgacggcggtggacacgttcaacccgggcttctccaagctcgaggtggaggacctcatgaacctcctcgcaccggagcccctccccattccgaggatggttcgcagctactcggagcccatcaagaaggtcaccaagcgcaccaagaagtgcacctacgcagctcgcagggtacgtttgatcccgcgaatcgactttctcttgcatcgaaaacccacacactaatctttatactgttggctcaacagagagaggtggcgttcctccgtcaggagtcgatggtgttggagcagcgtctaatggacctgcgctggaaccgcgctgcgtcgacgcaaagtcgcgtccacgtggcccgtgagagctttgagcttgccaaggctcagcaagagaacaagcgtcttcgagctctggtctcgagccaggaggccaagatccgccaggcggatgcctacatggtccgctccaactataacccgctgctgtccccgtaaggttggggataaagcagagcgaacaccacccgagcaaaggtggcgtgtatgcatcagcgggacgatccgtgctgcgtttcgacctattttgtcgccaggtcgtagccactcacccgagcgaaggttgggtgtcagcatttggcaagttgatcgtacagaagctgctgttgaatgtcatagtctgtcgagtgtcgttcctaaatgtttataagactgcaactatcacatcacaacattgttcccatgtatcgcgatcttgttgctccgcatccaacttggatagtacactcgatgcactgtttgctgtaattttcaccttcaagagcatctccacatgacgacgtacgttgaagatttatttttcatggcgcagatttagctgcttgcacggaagccaacttggtgccgacaccgggccacagggcacaccattgcatgcttagctgtttcagactgcacatccaaagcagaacaaagttgttatcacagtagcacaacctatacatgtacatccacgcagcatccctctatgactcacctcttggatctcgcaaatgcgtcgatgagagggttagcgccgtcttgaatgcaagttcttcccagcaggaacaggtaattagttcagttttgccaggctcgagataaagcgccattcagtacagtcaacagttaccgatcaagctgcaaatgctgaaggcttgtgttcttcttcagcatttccgcgaaagcaagtgcgcctgccgctctgatgggatttccgctcaagtcaagctgatcgagcactccattggtaacactaagcaatcacagggcttcaacgaagtctacagtaagttggcgtgcaaatctcacgtacccgcgtcaccgtttggttttgctgcagtgccaacgcgatagcctgcacgccgttgtttccgatctcattctccatcgattccttgtcgctgtagaccgattctccgttgctgagatcaagtagctgaagtgtcttggtaagctgaaccgctcgatcgatacatataaaccttttagtaaatcagcactcccaaacaaaagcaaaaccaacaaataataatggcctcacccgtattccactcgccagaaggatcgctccagcatctgcgatttgacaattattcagccgcagcttgacaagggcatccgaactctggagcataccctggataaacacaaatgacattattcacaagccaagaatacacataagccagaatgcacgtacagagatgacaccgcatccggcactagcgacgggaagacggtagcaaaccacttggttttgcaccaaaatgtcgaccttgtctcctccaataaccgggtcttcatggttagcttgctcctctgatatccatctcgggcgacgcttaaatagcggtgttggaggtcgcagctccatcttcaaggggacttggaatcccagcgcaactgatagctcccgaaagcggtcgtcaagctggttctccccgagcggtagcagcaccagccgcagaatcctcttcatcgcatggtcgactcgcttcggcgtcaatagcccgttgcgactgcgcataacgagccaaatgtgtgagcctccactggatccaagcccacgccttttccctctttacgtactgccgtcgcctgttgcgctccaccttggcacaccagacgtcgatggtcttgaggaaggcctgcgcctcgaacacgtccagtctcgataggtcataggcgtagacaagctgcttctctggctccgacagcgcatgcaccaacgctggatgcagtcgcaagctgcacagtagcaacaagcacagcagacaggtaggtgaatgctctcgcagcagcagcagcagccaaaatactaaatgctaggccttctcacttgcaaaagtgcttcagctgccgtccgatggccttcaggcagagctgctgcagcgaccggacgcggctcagcgggtctgcagccatgatgcgactggcaaaggtcaactcaataccattgtatcttgaagcgccgtggtgaatgatatgtggtgttcgatcctctaattacgtgtgtaccacatcaaatccgattgccgggatttttcgcgataaagagtcagcactgcagcttccgccaatcagattatttgcttgtaagttttagcgaatgagaagcgccggaacagctccatgtcgcacgattctgagtcgcgcgcttctcgagcgcatcacaagccaacaagcggccaagggctcaagtcaagttgactcgttgtcgcattgtccatgcgctgacggacgcgggcgccttcgccccaagcccaagacgagaagcgcctctttgtacctgactaagtgacggatccaggctgctagctgctagcagacgcaacgccgtccgcccgtcgtccaatggagactgaaaacccccttggagaggggacgagttgcagctgcggtggctgtcttgtgtgtcactctgggtgtggcctgcaggcgacggggcggctccgagctacgtgactgcgggacgtacaagctgcaagagacgagaagagtcgcaagatgtcgagcgctcgtacggtggggctgttctctctgtgtcttgctctgtgcatgatggagtggagaaggtgccgccttgtgttgttccgcgtgtgttttggcgagctgcggtgtagtgttgaaataaactggtcaagttggcaagcgcatctcgttacgatcgctacaagagaaacgacaagctacggtgacgtttgatttcggcatttctatctcctttttaattttttcattggagtttgtgtaatgttccgctgtgaatcatggagtgcagattgatacacattgtttgcattgtgatgggaagacaataggcaagtcctccacatgtgcattgtctttctgacgccctggtgactggaacaaaacaaaatcgtgggttgcaggtgccgacggatggacatcatcatatctcgtagttgaggcaagttttctttgcgttttgctgattttacatgaccttgtctacacaacaaaatcgtgaatcgcaggcttcagccgttcatcattccacaccacctcacccatcccagaaccgtcgtctggaacgctcgttggttgacaaatgctccaccattatcatctacttttttttatcgtagtgcaactgcaccataaaaacaccaaacgctcagcacctcaagcaagtggcgcaacgtcaatgtggttatcgggtcattcagcccgccttcgccaggcaagcgcagcattcatttcctcctttttgctttacgtttcggggaggctgtggcatgcaggctgctgctgtgcgtgcgcgcgtcgtcgtagaggatcttcagtcggcagtggtcggtgggtgcttcagatatgggcaagtggcaagcagcaagcgggtagtttcgtcgtgtgtcgtgtatgcatgcatgtgtaggcaggctagaggtacgcaggcagtcgaggcgacagaaagcagcggcaaggacgaggtggtgctcgagagcaggagaagaagaagaaagaattcaaggcaggcaggtggcctttgaagctgtatgcatggctgataacgtgtcttattgtcgtgggttggagagtgaggtgttggtgtttcgatcgcgcagcgttgggtgcgttttcgatggcgtgttggtgacagcgatggcggcggtgatttgtggaagattgagattgtggactgacgtacagtacgatcgaggagtggacgaaggaatggagaggcaagtgcagtgttggagtttgagtgcagcggagaccgcgtgcgcggggttgatggcgtcaagtgtcggtttgtgtggatgtctggtgactggtgatggcatggtgtattttggcattgtagctttggttgactgcgtgatgtgaagcctttgttttgcaagtggtgttgtacgtgatgaagtgttggtgtttgtggtttgtttctttcatgggttaatggcgtcggcttgtggagatggaggcgattgcgacgagcagtggagactgtggcgagcggtgtctggcgattggttcgcgacctcgtggtgttgtcagtggtgtgatgtatatctacgtcgtttacatgttgtggtgttggagggcagtgttcaaggcgaaaacgacgggtgttccttgcgtgcaggttggcgatgtccaagtgcgatgtccaagtgcaagtccaagagcgagtcaagagcgagtcgaagtgcgagtacgaagagcgagtccaaattcagctcaagtcccagtcaaggtacggtttggttcattcaagtgctcaagtgttcaagtgccagtcgcggcggagcccaagctcgagcggttcggtcagtgcatggtgatctttatcttcgcgcgtggttgtggttattcgttcggtgcattcgtcggcgtgtggtgttgtttggtgcttctgtgcgtgtgaaggctgcggagaggtcgatccagacggaccagaacaagaaggcaagcagcaagcaagcagcaagcaagcagcgagcgagcggatccggaggtgttggcacattcttcgccaggcaagcgcagcattcatttcctcctttttgctttacgtttcggggaggctgtggcatgcaggctgctgctgtgcgtgcgcgcgtcgtcgtagaggatcttcagtcggcagtggtcggtgggtgcttcagatatgggcaagtggcaagcagcaagcgggtagtttcgtcgtgtgtcgtgtatgcatgcatgtgtaggcaggctagaggtacgcaggcagtcgaggcgacagaaagcagcggcaaggacgaggtggtgctcgagagcaggagaagaagaagaaagaattcaaggcaggcaggtggcctttgaagctgtatgcatggctgataatgtgtcttattgtcgtgggttggagagtgaggtgttggtgtttcgatcgcgcagcgttgggtgcgttttcgatggcgtgttggtgacagcgatggcggcggtgatttgtggaagattgagattgtggactgacgtacagtacgatcgaggagtggacgaaggaatggagaggcaagtgcagtgttggagtttgagtgcagcggagaccgcgtgcgcggggttgatggcgtcaagtgtcggtttgtgtggatgtctggtgactggtgatggcatggtgtattttggcattgtagctttggttgactgcgtgatgtgaagcctttgttttgcaagtggtgttgtacgtgatgaagtgttggtgtttgtggtttgtttctttcatgggttaatggcgtcggcttgtggagatggaggcgattgcgacgagcagtggagactgtggcgagcggtgtctggcgattggttcgcgacctcgtggtgttgtcagtggtgtgatgtatatctacgtcgtttacatgttgtggtgttggagggcagtgttcaaggcgaaaacgacgggtgttccttgcgtgcaggttggcgatgtccaagtgcgatgtccaagtgcaagtccaagagcgagtcaagagcgagtcgaagtgcgagtacgaagagcgagtccaaattcagctcaagtcccagtcaaggtacggtttggttcattcaagtgctcaagtgttcaagtgccagtcgcggcggagcccaagctcgagcggttcggtcagtgcatggtgatctttatcttcgcgcgtggttgtggttattcgttcggtgcattcgtcggcgtgtggtgttgtttggtgcttctgtgcgtgtgaaggctgcggagatgtcgatccagacggaccagcacaagatcgtagttggtgaaacgcggttggtgaaggttcgtatccgttgtatatttcttcctaacccggtgtttttcaacaccacccttttcaaagagctttcacttcaagtagtattcacatattctatacttgcactagccactgcaatgaagagcaactgttcacctcattctgtttgtacgtctaatacttcatactctacgagccccttggtaagaagtacgcaagcatagcaacactgcaaactatccttcgcatatcccgctgtctgagccatagcctgcggtaaatgcgagcccaacgacgggtgggtgactgcgcaaaatgtgtttgctgatcacattttgagtttcaattggccatagagtgcgacaggcccgaggattcaaaactacattgcaaacaacgtgaaggcgtagatctactaacaggagtttgttactccttgctgtgccaggttaggcggtagcaccggagctgagtgaactagacctcacgggtgtggctgacaggtactatacgacgtgccggcggtatatgacgcctacaactaatatcgtgccacaaagagcggcaacctcttgacgccagacagcagcactgcaccaccgggacatcaaccgtcgctgatcccgaaacgccgcgttgacacacgcacttcaactgcaaggctccctatcactctacaacttatctcattctgtacgaccattttatacagtatacttattatgccgtctcatgacctctcgcataccgatacatttttaggctagtaccataacagttttgagccaataccgtcgcgaaagtataaactttccacgccccagaaaaagcagtttaaaactccccccataaagctcggccgcacgattccgtcggtgcgcagcgtcacacatatggcttcaatgccaggcgcccacatgctggcgccggcgtctccgcgctcggacgccgccagcggccacgacacggacacaccggggacctcgactcgcgccaagcgcaagttctcgcacacgacggtggagcagcgccagtgtctgctcgagtggctcgagctgcccggcaacttcgagctgctcaccaagccctccggctcctccagctccaataccggtacaacccccaccaccacccacgccatcgccaacgccaacctcaacgcgcccaagaagctcaagaagatcgacggctaccggtcgctggcccagtacatgaaccgcgtggcacacacccagtggacggacaagacggcgcgcagccgcttcgagagcctcatcgcggccttccgcaaggccaagcgcgaggactcgcacaagctgcagtccgtctaccagcggctcgacgcgctctactgcagccccgagggggacgcccctgccggtgagacgcggtttcggtctgagagtctcggccagaggtccgagagcagcaggtccccacacagcgacgtgaacgtgagcttcagcgagctcaagaccttcgtgaacgaggagcagagagccatgtcgccccccaggcggagagccaggtacatggacgagagcgtcttcgtcacgtccacgccgacgttgactgccgaggtgggcgccgaggagagcgtcacgcccgcgcccttggagcctccaaccaccgccacgacgacgacgacgtccatgagctcgcagacgttggagacggtgtcgatgagtgcgcagacagcgacgtcggtggagccttcggctttgaccgccacgtcgagtgtgcagctggaccaggcggccatgctggagagccagcgactcgccgtccggcaacaggagctcgagctcaagcagagcgagctgcgggctcgacaggaggagaacagacacaaactgcgcgccgaagtgctgacgaggctggtcgaggcgggcaagtcgccggccgaagtgcgcgagtacctggccatcatggaccccgtggaaaccccaatacagcctccgccgacgcgccgctgaaaaatgatgggagaacacaacaactaacgtaagccccacacttcgccttaaaagtactaaccgaatcaacgtgggggtcttgagtaccgaattcgtccgtaacggcaatcaaaaaggcaacttgtcttcaagttgcagtccagtgtccagcacataaaatagtgtgtctccacaactgtcgggctgagctcatatatcgcatctcattccttcttggctacattccgtccacctccttcctgcagcatctccagtctccgttgaccctctctccaccccccccccccgcccatggctgtgcacgccttgccgcgtgacgagcggctgcagtgcgaccgccgcagcgaggcgcttctgggcgagaccctcgccgccttcgccggattcgacagcgcccgcctggacccgaccgagtggaagttcctggcgcgccgcgaccagttcacagtgcaccgcgccgtgtcgtccaagcgccagggcgtcgacagccacaagcggcgcgtcatcgccagcgggttcctcaccgccagtctgcacgacgtgttgggcggtctctacgtcgaggacgaccacgagctgctcaccacgcaggcgatactcaaccccagcggcaacacggcggtggacgcggccgtgctgatgatagcagagcggcgacagcctcgagccgcgccgttccgcttcgcgggggtcaaatggtactcttggaagagaaataccagtggtggtggtggaggcaaccagttgactatcggggagggccaggagtgtgatttattgacgtacgaacgcatgggggacgcgttggctgacgctcgagacggtgacggcagtcaggagctcgcgtaccatgtgatcctgtcgctgaacaaggccgagtggccgctggacgtgcctcggggacctggactgcgacgagcggacatggccttttgttttttattccgcaaagtgtgcgaggacctggtcgagtgctttacgctgctggactatgactgtcgaacggcggggtcgtcgagacgagcggcggacgcggagatggcggaccgagtgctcatggtcacgaggttgccggattgtgcgcgggcaaaggttctgtccgggtttgtccacaaggcgaaagcaaggccggtgctgatgagcaagacgtgtctgcggtgtggctcgaggaggaaagtgctggatccgttgaggaattgctctgtgtgcaagaagtcggtgtgccagaagtgtttgcagctgaaggtcatcttctcgatcaactcgcggacgcacgagccggagacggacgcattctgcaacaagtgtctcgctcggattgacattctgaccgcgaagaagaacgcgcagcacaatacagcgacgtctgcgagtggtgatagctcgactggaggaagcgtgaaggagaaggacagggagagtcactctgggggttccagtggaagcagcagtcgaagcgggtttaagttctggaagaagaacaaaagagagccaagcccgagaccggagaaggagaggcgcagacacagcctaccagctcccatgagtgacagggggccgcatacaccgaactatgagggactgttcaagaactacgacgtttttggcagggcaagtgataatccacgaaggcggcagttccgccttgacgatgtggaagagcaggagccggacattgagcaggagagcgccgatccgcattatgacgagctgttccaacactaccaaatgtctggcagagcgtccatcggccgacgaaggcgcgtgtttgaccaggggttggcgaaagaacaggcacctgaaaagaaccaagagaaggatgagccacaacgagaacatcggtggaggcagacaacgttcctggcgaaccctgaggcagcggcagcagaagctgctgcagctaatcgtctctcgctaccaagacaaaccattgtggtcagagaaagagagaacacggttgccgaggtcttccccgtggcgaagactgtgttggagaccgaggacatgtacgcagaggatggcgaggactccccccacagcgaggctgagcgagctcatcttctgtatctggaacgacgacagcgcctggatgagcagaaggaccagacgcaattctgccgccgtgagtctctcacgacccctttggcaaccccagcattgccaaaaacgacttcagcgcgcgacgtcaatcgcccagttgccagtggcagtgccgaccccatgacgacgtcaaggcgtagagttgaagctcccgtcggcactgtcgataagcctgaggacggagagaggaaagctgcagcaccagtaagtcgtcgcagtgggtctggcagagggggccggaaggttcgttcacaagacaatgaggacacgtttcgcatggatctgtacggacgcttttaaccctatcgttacctaccagaaaggtacatgatgaatctttttaggtgggccatagtgagagcaagacgttctgaaacgacgattttcgattttggttgtagttatgaccaatgatacagctcgaagttctagcgtagatcatggactcaaatatcacgctattgagtctcttgtggtactgcgtgtttccaacggcgcggcgtcgggagtaagggtaccggcacgagtgtggtcatgcgggacgtggtgggcgatgtcgctgccggcatggataatttgtagacgaagcagcgccgctcagtcagctggcccaacttcatcggtggccagcgccacttgcagcagcagcaactccttcaaaatgaccacgatggtggggaccgtggccaggtggtcggtagcagcttggagactacaagaaggtgggtgttggcgcgagtgacgggagcacctgggtcatttgtgcgtcgaacggttgtggtgccgctggacgtcatactccgaaggtgttcaagggcgacgcgaatgacgggtgttgcttcgatacctacggatggtagatgccgtggtgtcgagtgcagatgcagtgtggattttacagcgagaccatgcagatcttcaggacacagtagtaaacagccacgttgtatgcaaaactgtgaagagttcaaatggaccaaagatgttgatttttgtatcgcataggggctgtatgggctctactagtcgtattacatgtagtgctagtagtactaagatgtggtctcttttagtgcgggcccaagcagtgcttgccagtctctttcgttagcacaagcgtaaggaaagcccgtgaggcgtaccaaaaactaagtagaatgacaagtctcgttgaagcaaacagctgcatgatattgttaccttcataatgctcagatcctgacgtaattgcttgtgctatccatggaggtcggtgtgaccttgacgacttgcaacggcaacatcgtcggcgacgtcgctgggcggcaaagcgactggaaggggcatcgggtggcgggtccatttgcgtccttgacacgcccggggcttcggcagcaggttcgtcgataccgagcgtgctcttgctcgtggttgctggcaacttggagcccgtgaccagcatgaccccgctcggaccatcgcagcctacaatcgcagtcagtgctggcgcgatggggtgatgacgcgagttccagtcggcgttgttccaacgttggtactgcgctccacgatcggaatggttagcagcgatgctgacggcttaatcacagcataacttgcgcgacaccgtcccgtatccggaaggccgacgaggccgtcacacgacaagcaactcacgtggccatcgagtgtggtatccgctgtggggacgttggcgtggacaagccgcttgtcgcccttgctgtcgtccagcttctggccgtcgtcggcgaccagcagcatgccgctcacgcagcagtcgtccagcgtcccggtggcgtcggcggctggcagggtggcatcctcagaggcgacgtggatggggctgagtatcgtgtagcgactggcaagtttggccgtagcgcagtgtaggacggaggtgtcggcagcagctcgcaaatcgcaaaatgaaatccaaatccgagaagctcggaatccgagcttggcgccgaccaatcgcatggcggtataacgttccgccaatcacggatcaaatatgtaggatcccgccaatcacgtggcgcgtgcgaaagatcccgccaattacaatacgacaatgccccaaaagcgaacccgaaggaaaatcctttgtcttcgactgacccatcttacttttgcttcaacttcgatttagtacccctaataatgtctatggacagtcaaaatggagatgggtgccgcgaggctacatgctaccattgtacgggtatgcgggtactcaataataaggaagttggattggaagttcggccatatcttgaggctcggttgataaggtatagttagtaggcagctgtagcaaattacacgcatccagtcgaaagcagctatggttcgcatggtactagaagtgcaatggcttgtaaagagagaaggctctactatgtttcacccgacagttcataggtatgcgtgagtaaaaacaggaatcaataaatcagcggtaagtccgattaatatacacatcgttgagatgttatacgcggcgatcatgtcatcgtaaaaggtttgatatcgtaagatgtgcacatagcattagtcgacaatagagtctaggctccaagcgaatgccgattgaagataccagtaagtacgacttgggaatccgaattacgtgtcgtcgcttggaagctccacaagaaccgtaacctcaccgcagcggtgttcctcaatgtagatgtgtactagtgacagtaccagcagtgtcgtatgcgtaggttgtgtctgttttcgaccgcatgacgatcgaagctaaactgtaagtatgtcatgtttacggagttgacgggcttctagtggcaccagccataatacccgaaacgttgcggtgctcaactcagtagccacactagcctcgatgtactagactcaagaaatatatagatcactagtttaggaaggtttggacgcaatatgtgtcctgattcagcatctacttcgaaagtaggtatacgtacgagcgtggtagactttggcgctcaaggttatatcagcattgctgatgcgttctacaaagcagctatgccggcccacgacggctccgatactgtagcgaccgggtgatagcaaccaggtgccattaggtgggtggtgttatggcgcgggtggacttctcttaaaacgatgagtaagtcgtacagccgtaagttttaggtgagctggaagtaaaccatccagcaacgcgtcataccattatcctgtgtgggccatcgttgggcgccatcaattggccgctttattcagcgtgagttggtccttagggacaaccaagccgcctgtgctatagttgagttgagttgccaccatgcctaccgtgtaggcatccggccattccgtggtcgatatggggttggggccctatcattgccttctggaccaacgttaggaccagggggggggtagcatttcaccggtggcgtttgtccagagtggctggtagtgattgtcatagcccggcagcgtgctaccgtgctattggtctctctggggtcgccgttgacgccgctagcgcgcggtccgtaccgttgcagggatctggctgattagtggggaccgttagtgtacgtttcaaacaaaatattgtggttgggggatccccgcgatgggataacttgcctcgagcctcaagatatggccgaacttccaatccaacttccttattattgagtacccgcatacccgtacaatggtagcatgtagcctcgcggcacccatctccattttgactgtccatagacattattaggggtactaaatcgaagttgaagcaaaagtaagatgggtcagtcgaagacaaaggattttccttcgggttcgcttttggggcattgtcgtattgtaattggcgggatctttcgcacgcgccacgtgattggcgggatcctacatatttgatccgtgattggcggaacgttataccgccatgcgattggtcggcgccaagctcggattccgagcttctcggatttggatttcattttgcgatttgcgagctgctgccgacacctccgtcctacactgcgctacggccaaacttgccagtcgctacacgatactcagccccatccacgtcgcctctgaggatgccaccctgccagccgccgacgccaccgggacgctggacgactgctgcgtgagcggcatgctgctggtcgccgacgacggccagaagctggacgacagcaagggcgacaagcggcttgtccacgccaacgtccccacagcggataccacactcgatggccacgtgagttgcttgtcgtgtgacggcctcgtcggccttccggatacgggacggtgtcgcgcaagttatgctgtgattaagccgtcagcatcgctgctaaccattccgatcgtggagcgcagtaccaacgttggaacaacgccgactggaactcgcgtcatcaccccatcgcgccagcactgactgcgattgtaggctgcgatggtccgagcggggtcatgctggtcacgggctccaagttgccagcaaccacgagcaagagcacgctcggtatcgacgaacctgctgccgaagccccgggcgtgtcaaggacgcaaatggacccgccacccgatgccccttccagtcgctttgccgcccagcgacgtcgccgacgatgttgccgttgcaagtcgtcaaggtcacaccgacctccatggatagcacaagcaattacgtcaggatctgagcattatgaaggtaacaatatcatgcagctgtttgcttcaacgagacttgtcattctacttagtttttggtacgcctcacgggctttccttacgcttgtgctaacgaaagagattggcaagcactgcttgggcccgcactaaaagagaccacatcttagtactactagcactacatggtagagcccatacagccctatgcgatacaaaaaccaacatcgttggtccctttgaattctgcataactgttgataatgtttgagggtccatcaagcccaaaacaaaagcatatagggagccataacttcggaggtgaggctggcaagtaccaacccgttgtgtgcgttgcgcacatctagtagtatcgattacaacttggcagggccgttgaggggagaaactttgtagctgcgaaagctattggtacggaatgccacactctttacgccacgagctccgccacggctcatttgcaatcatcttcatctatttggcatggccaccagcagctgtcatgcatttaactgatgctgtggtgattggtctggccatgacatctccagctttggagcacggactggcgtcgaggtttagttggtgttttagttggcgcagcgatagcgcagcgcgctccgaacaagtgcttgcggctcaagcactgtgcggatgagggctgcttctgaccgaactcggcgctgcgctgacgccgcagtgagggcctggccttctcacgggaatgttggcgcgaggcaatgaggtgtgtgtgtgccacatcgtgcgacgctgtgatccacacggtactgctcctatcgagacttttcgagaggctgctctcgcggtactacccatactggtatttttgtgaatcatcagcgaatcatagcgaagcagtaaaatgatacctcatgtatcttttgatcgaagggtcgcctaaaacctctcatcacctatatttttgctcgaaaacctaatacagcaaaatgatacataatgtatctttttactgcatttgacttgaagtttgtatggtgtcccttcaaacagaaatgtatggcgttaacgatagggttaacgatatgaaccaaacaataccagtaccaatttaactcaaagtgagtcatagtcctcgttcgaaagttacttcgacgaatacgctcgttgtggcggcggtagttgggcgaactcacgaacgtactcgagttgtgtggcggggtcgagaacgttgtacatttcagcctcgccgacgttgcgagtcaggtgcttggcgagccgcagccgcatcgccggctgcggtagctcattagcgtaatgttgcaggaagtgcacgatcgctgtttgactagcggtaagcttcgacgacgagccaggctgagcctccccgagaacatccccaaggctggatgaggacggcgccgtaacacccgccgcgctgtagtcgtcatccccacgttttctctttgaagtcgctcgtccctggtcgatagtgggggtgggggtttccgtctcgaacatcaccgacgtatcatcttcatctaggtcgttcacccttgactcgcccatggtattggcatctgtgttcctgttctcgtcggtctctccttccgaagccgtcgacgacgccaccgtctgctcttccacgacttgaggaggattcgctccagtccttgaagacgagcccctagtagtcacaacagtcgaagctctttgagcgtcactgctgtctccactgagcacgagcttctccgggtgggccttcttgaggtgacgcagggcggcgctcgtggtgcctcctctgaacgagaagatgacgtcgcagtacctgcagatgcgacgctcgtaggatttcccgagcttgtcctgcagatttcggtgcggcttggtgtgtagataagccaagctcttcttgccgcctcggtcttcggccccactgggaccaggtctcgcgctgcccgaggacggcatggacgtcgaggagccattgctcgagtactcagacgtgttgctagcgacgacgaccgagtcgacgagctgccggagattgccggcgctcgcggaggaaggcagcttgcgcatgagccgcgtcgagtcgagccagctcgatttctctcggctcgttcaaagacgaatggacgagccgatgacttgattttgtatgactatacaaaaattagattaggaattttatgtggtatacgtaaagaagttgaagttacggacatgtattgtgctttgcagctattttgccgaccattttagacgctaaatatggcaaagcctgctcctaaatatgtgtgaaaaatgatacacgacctgctaaaattatgcataaatccacctcatatatatatcgacttgggagggcctgtcaacagccatgcattggcccagtacaccaccgtccatgatccccagcatatccaccctcttatgcataattgccgtgcgtgtaggtgcttgtggataaaaaccgacagaattgcagctgcacagccacaattacactttcaaaagtgcaattgtggcgcttttagcgtaattctaggcctccacccatttatgcacctcgatttaccgtaaatatagcaggtggttgctataaatacagcaaatctcgcctcatattgccaaaatcattgcaaagcacaataaatctggcaggattacaggtaaatctggctaggatatcctgaaccaagccgacgaactgaatatctgcatccatgtagctgacgcctgcacctacagtatatgccgaccaaaagcaacattgcaaatcggcttctgccccctactgtataatactccttcgaattactatgataatcacatggatcgtaatctcggattgaattatagacccaagcgagttctgttggtacagtatccgtcttggtgatcggaaaccaggatccccagcaacgatctgttattatagataatggaggcgactattattcgtgagccgttcatttctggcgagagctccacgcctcaacattttactcacttcgtttttcactctccaacgctcaagccagtcccttccaagccaagcatacgtctattgtggcttcttggcgctaccgtgtgtctcctcgccagtaccgatgctgttgctgccgtcactggcgccggagacaacttccacgcggtccagaatggcgacgatgggagacgcttcttgagagccaacccggacaacaacttggatggcatcgaagtcgccgagaagagaagacttgaggcggcttcggtctttgataagtttgccgacaataattacgagggggatactcaagcaggaaaaaaaaggtggagcggacaaactgaaggcatttgaccaatcgaaaatgtggaaggctgagctgctgaaaaagcttgtcggtcaaactcaataaaccacggggcagaataaactcaccagaagcacgcaaactgaaaagtccaaaccgtaccttgcgagtggaaacattgggctagtctggctaaactttgagaaggtagatcaagtaaacaaaaaatacatgacaaccttgattttgactttcgaatatttatgtatggtctttgccaccaacgtatatattcagtacgaaactacttccgtgctgaagccactcatgatcggttttacacgacgcagttcaggatatgaaagctaaataaatgtgtatattacagataattattgtaactcttaagttgtttcttgtcgggtccagcaccagcaccccgtacgaaagcactggaagagaatcagggctcggaaaaaacaattatgataacaacataattattttgacggaataacggattattgggattcccagctttccgtaagatatgatactgtaccaataataagtagattgtgtttttaccagatttctgtgcgatgttgggtaaaatggcttatggttgttttatgttcaaaagtgaaacaattatacacaataataattgtaattattattacggggatgccaagtcacggaatattttttctaagattccccgcgtttataaattatttattattttccgagccctgggaagagtaacgcagtgaaatagcactgaactccttctccaaaatccaaatggtatgtgaaagtcaatgataagcctctacgctacgagtgtacttcgaagtcagcggtccactgccttcacatgacgaaacttacccagggatctgtaaacggtaacgacacattattgcgtcgccgtgtagtgagtggtacaagtatagtactcgctgcaccgatgacgcattaaaagggacgatagacgcttttgacacatttaggcccgacaagaaccatttttcttctttcttcacatgcagaccagcttccgatgcgacgcgaagacaaggatagatctgtgaacaaagcacccttactgtcacttcacctgggaaccggcttcactccaatttgtatacgtgacgtcctacgccacgaagtgacagaacatcggtatttacttggcagtacgaggaagaaatgaatcgaagtaccggtaggacgcgcataactaaagaaaagtacggtgaattccattttgccatggcgggtgcaattacatagtcgtaacaaccaaactagactgtcaatgtattcactgtcatcagcctttgcgtacacgtcacgaacgcgtgggcttgaccgggaaatgattgttgatccagaccgtgtattgcttcaggagcttcccatcgttattggcaagcgtcttcgccagcttctgcttgacctcgctgagagtgaatcctctcgttttccatgccctgaacagtctctcagctaattcgacatcacccctcgcctgcaagagcatcgtgtcctcaaacaacagcttcgctttcgccagatcttttgccttttggtccgggtagtggatgttgagccaagacgcgtagttcttgaatagcttgtcgccgtcgccgtcgccctttcggaggcccagcaccttcagcttcttgagtatatcagtcgattcgtgatcgtgggtcttccactccctgaacaacgtcttcgcgtagttgctgtctcccaacgcgttttggatcttcgccttgttgaacaggtcgtaggctttaggccgacgcgggaaaagtgtttgtcgagccaagcagcataattgcggtagacagtattgagcctcgggtccttgctcaacttggaagcctccagtgataattttgtgtcttcaatgtcgaatccgtggcgcttccacctcatcatcagagtctccgcgtacttggagtcgttcatcgctttctcaagcttggcggcgctgaacaatttagcaccggcccacctctcttcgtcgtcttcgtccacgcgttcgatgtcgtgcagcgatctcttggcgctgtggctcacagctagcacgtcgaggtccggaaacgccattgtggagaccttcgtgccctcgctggcacccgcgaccgcagcgagagcgctgtcgctggcaagaagtgcgagcgcagacgctgccaggaggatggagggcagacgcatggttgattcgattcctggcaccgtggagagaaagcacatgtgggctggagggcgaataacggaatggcgatagaagtgagagggtggttgacgagatcgatgcctgggaaacgcgattcacgaacagcacacaaacgcgctttgaaagcagcagatttggttgtattcgttttcgagcgtatcgtcccggacgaagacggaagtcggacaggcgcatgcagtgattcctagaaaagtatggatagggacggggggccaatcagataaataaattatggcgtatattcgataaaacgcagaaatacataatggcatattcgtcattaccagcatacattatgcataagtgaaataaaacgtctgattggtcaaaaatacacaaactgattggctacacaattattctgccaacggcctgacctcaattatggtatggtgattccaagaaaccaaaatacattattatggggggaattatggcaattattgaaatcaccatatattattaggaatcactgctacagttttccttcacaaattttagtaggatgaatatgtggcataccggtaatcacacagctcggttggttggctggcgagcttgcattgggaaggcaagaacggtagccatcattgttgggatatcgcagcgaattgcttttggtaccgacacaataataaatatttattttataacatggcaaacggagaacttcgggcagctgggtgaacacagcaatggaaacaccaccatacttgccgcagccgtcacccagatgctatcgtccatcgcagcaatgcagcgcacacttcagaagctcgtcgcggtccacgagagcaagtccaccagcgctgacggtcctgctccatgtcgctgtgctggccaggccccgcaggcgagcactgacaccgtcgttgaagcgcactctcttgctggctaattctacaactggtacacactggagctgtggtacacggcaacccaaaagaaacaacagtttgttcgcgcttgtaacagggttacacgcacaagtggctacagtcacttgttactctaacagatgcgatgtctgttagaggtttgaacacttcctcgaccttggtgtaaggtacaccaatggctacatacatttacgaccaccacgacggatggtccatacacatttaggattcctattggctgaaagcagcatcttttagccaatgagtgacatgcatagcactggaaatctgccaaccagccgttggcagaatcctagtttagaatattacatttagaggaagtcagaaacataaaacaaaaatagcagttctcatcttttaccaaaacacgctacttggagtctttatcttgtttaaagtacactcgtggatctcgagtatacttaactgaagtaaaagaaacctacgcttcctcatacacgtgcgcatatgtgtaagccgtagtagtgagccaaggtaggcccactacagcgctgatctcaaggcaggcgtcaacatcatgatcatagcaggtagacgtaccaacggcgccactggaccgggacggcgtcgcgtttcggctgtggaagtagcgtgtctggacgctagcggaagacttggacaagaaggtcaacgctgcgcttgggagtatcgacggtaaaggccgatccgaaaccgcggggtcgctacggaagcgctggagaaagctgcgcgttgaccaccgctctgcgtacgacgcgctctgctcagcatttatcacccgcaaagcgaacggtggcatcgtcgaccgctgcactccagctagtcaccaatggaagcaaaaagacttggagtcgtaggatcacgcagcttgtattaacgcttaatacattcctattcatacaacgaattcaaggcgcaaatgcacccgtcatcgccatcccacaacttaaacacagcgcatggaattccgtcagtcccgatacaaagtcatacacaatagaaaaacgctcacataccgtcagcgagcgcgcacgacatcgtgcttggccgacagctaccaaaactggcagcataacgcccgccctgccgggttttgtagctgctttcgccgggtccttccgtggggcgcgtggggcgcgcctgggggcactcgggtctggggtggccggcgggggcggcgtgcggcgcgctcggagcgcgctgttgtgttggagatgcggggcggaaagtgcgaaggcggagaaggctgcgcagccggccaaaataaaaccttaaggttttttcttggctttggagccgataaacaagtccatactttgttgaagtcatttggaatctcactttttattggctctcctcattgggagcggcgtttgggacctggtcatgtaacacagatgtattcgctgtagtgttgtttattaccaagttaataactcctaataactggtattaggatttttagatatctaataccgattggtaataccattatgtaaagattgtgtacggtaaactgcctttttgtgtgcaatctaaaaccccgctcagagtgcgcttttccttaatgctaacacttgatgcttgttcccacctagtcttccaaccactaggaaggtatgatgggcccgtaggtgctagcctcatcccgtccttgtttttagcttaaatattcctgacacaccaactttacacaaaaggtaataccgttaataggaagttattaggaaggtaataacgataattggtattaactcggtgatgattttacccaactctaattcgctgtacggtagagacgtacgtgtacactgcaatctctgggatagtcccgtgatatgaaactaccgggtaatctggtgatgcattatgcgttgattctgtttgggattagacccaccgatcttcgagtatatgttatactgtgtaatggcgaattatcgagatattgccagatctctgaagaggaatattatacatccaagctagtgcccgcctgcagcggacgaaagccgttatcagcgctacagaaataattgcagcttctacactttaggaatggtattgaagcgaacctcgacagatcacctaccaaaagcgttttttttagctgcgtactgtaatagtgcacttggtacctttcatgctttttttgcgaattatacatgtatggtactcactggccggactcgcatgagcgggggcccaccataaagtatcaacagcgtgctggaaatttgaaaggaaattttgactggacattcactcaaaactcggatatacgctaaagttcttcagcgtagcaaccaaaacctatagtcggactgctcgcagccgtcggaattgtttagcctgcagagctgcctgcaccgacagatcggagacgccagactcgatacttcctggcaggctggttacacgggaaagcggcgccagcgaagagcagccgatctgtagcgaagtgttaccagcgcttcccgtaacttcactgctgatagctgcaccagggtacgcagtcgccatgattccgcaaaagtcacgcaagtaggagaagcggccttggagacagccccacgcgtctcggaaggagcttctatcaccgcacgactccaacgcaagcttcagagacggctcacggaagtaggcaccgcagagatcctggaaatcctgctcgatccaatcgattttttgcctcgaccagcctgcaagaagaagtcgctggatctgcggctggacaattgacgtgaactggcgcccacgcatcttcaccagctcatgcggcagcacagcagaaagttccgatagcctcggatcaactgcgtcaacgtcgatggtaattgatgtgaggcccgatacgagattcacaacactcgtagcaatttcactcacggtggagtgaaccgctgactggttggtaacgtctccgttttcaggtatctgtagagcctcggcgatatacgtccccaagtcttccagcgcagcgaaaactttctcgctggttaccgaatacttcccatccttggagatcgccaagttactgctattcacccgagtagccgcatcgtcgacagcggaatcgtcaactgcaagaggatccgagatactgaaccactgcaccaagaacgctcgcagctttatcacagcatcgcgagggtgtgacgtccccgtagtcaatcccgagatctcctcaagaatcggtatcgactcctgtccgattcgagctgccaatgtgacgcgaatccaccacgaaccgggaggtgcgcaggcggactgttctcgctccagatactcgcggatgctcactccatgacgtcgaaaccacatcgcaacgttcgcgactgacctccaccggttatctccaatactgggagcgctggtttccatcgtagcgagcagcacacgctgtcgaccaacgtacgcgaggagggccgtcagcgtcgagtaaggctcgccgcctcctagaattttgctgaagaacctctgcaccagtgagtccagccgacgcgcggcgcagcatacgcgcaagaaaccagctttggcaacactctcaaagcgagtagccaccgcattccgaagcgaaagtcgcgggtcctcgggtccttccgccgtgataccgtcgctatccgagatcaccgcgatcatcatatcctgccatcgcggggtaattgcgttcaaggcagtctctgcgatctcaaagacgccagtattccccgaggggtctgacgcccgccgtttgttcaagggaatcgacagtaagtggaagctcgtcacctctccatccacaaacacgcggagctgcacgtgcagacagtactcgacttgcgcctcgaagaaggaggctggggcgatgggcgccaccttgaggccgatggaataacctccagcgctttttgcaatctcactgatccgctggaagttgatggcgcataaatatcttgcgaacttgcccacatcgatcgctgggacctgcaccccgtcgaagaatggtccaattgcagccggttgagtgctggcgtacagcatcctggccgagttggacagcgatccgctggtggacaagtagtccacgaactgctggaactgggtcgggtcctggaggaccactcgaaacctggccgctgtagtgtccaccgctaagccgcctgtcctcaactcactggcgttcaccaggtcctcaaagtccgccatggccgtcatctggtacgtctgtccttccggggcaggtctcgctgcgtaaggtagcagtactccaatggccaccgagacaatgtccctgtccaccaagaagtgcacgggctgcacagttggacccatcgccgctgtcctcatggcgggagttggacccttcggaagtactgtaactggtctcgaagaagttgaagtgggagtggaagtagttgaaatagaaacggttgtggacgcaggtaccgccgtccgctgcgtcttccgaggtctcgcagcgtcttgattggtctccacattgaggtccatcgtggcccccgctgcaataaaataggcccgcttgctgtcgtcgctggacagcgcgcagtactcgccccagtgcgtcgggtgctgccccaccaggtggatctggatcgagtccttgcggaacgggggcttgaatgtagccaccttgtccgtggggcggcgctgggctcccgccttcgtctctcgtccgaagagctcgcagaacagacagctggcggtcagcacctccttcgtctcggggtcgcgctccttcacgcgcagccccagctccacggcgtaccgagccttgaacggcgccgtccgcttcaccatggctacagcgccttcacctgcctcgaaaaatggcgccgttgtcgttgtgttgggtacaccaaatatgatgtacgccacattgagtttagccatttggacgctggatggagcaaatggctgcgccgacgacggcgtcggagctgctggacgtggaggaggtgaaccactcgacgttggctgcgtacgcccagcagctgcagagctgcctgcaatgggaccctctacacggcgtggaaggcgaggagaagctgctgttcgtcgaggcgttgaccgagattgcagccatgccgctggacagtatcagcatggagatcaggcggctcctggtggtctccaaagcggaactcaaagaccaagaggaggctcaagatactcagggagttgatgcaacacaggaccacgtgcagtcagagcagcagttgcacttgcgcaacttaatttccgccctgagcgctcgagacgtgcagctcaagtgcaaggcggcgaacgcagtggggtccctgtgcatctcgagggtggcaggtcagcagctgctggatctgtatggggaccaggttctgaagaatgtagccaagatggccacgtgcaagaaccagtgggcgcagggcgacgcgttcttcgtgttgggctggatggtagtcatcgctgatgaagagacgctgggggccattgccaagctgctaccaacagtgatcaagtgtctgcatcgcaacgtgaatctaccgctggaattgaggaacgaagctgaaggggagaacgagaggagagatgctgctgcgagacggtcgagggaggcgttggcgtcgtctgagcaggcctcgaacttcagagtctacgcgttggttctgctcttaaacttcagtcagcggtatgtggacgtgttcgaagatctactggagaaggtgctgccgatgctgagagacctggtagtcaagctgcttgaaccaacgccccgtccaactgctggggatgacgatgagtccaccaccactacgacgtcgacaacagtctttgacgcctccgagtacgctgagattctgcggttggcaattacgctgctgagtgtgctggtcgaccagattgagactgccgcctctcaacttttagagctcaagatgctgccttcgctgctgaaactcaagcgagttctcgaaacccccgaagtcacagaactcgtcggcgaagctggcatcctggacatcacagaaagacttgaagcagccattgaaactctcgtcaactgcagatagattcaaataaacccagcctataaaaataaataagtaattttagctacacttcttcagaagacacgatcttctccactatagtgcatttgggccaaattagccaaatgatttggttaatacatgtacatgtaatcgtacctagtagagactaaacaaaacaaacgcgggaacagcgcgacaccccagcgccatcatgtcggagcaagtgtcggcggatgccttggattccatggtcgtgacgaccgcagacttcaatgaggacaagtaccgactgctgcaactgaatccggagatcgagcaggccatcaccagcggcagcaagtgcgtgcttcgcctcaaaaacccttattgaaaaatggatacatcgtctattaataataaaacgcgtctattcatgcctgcagagtctttatcgttggcgcaccggacgcccgagcagtgctgtgcacccaagacaagtcgtactacatcaagaaggaggacacgtccaacctgaggctattaacgactcacacggactggagcgggccggagcagaccacgggcaagcgcacgatcgaagtgtcaggagctgctcgcttccactacctggtaggtcatggctacgaaaatgtagccaaataggtgtatgatactgaagctatctgttgctgtagctggagcataaggcccccgatgccacgcagttgcgtgcgttgctgctggaagctccgtacgagaagccccagcgtgctgccgagacccaagccaaacgcgctaagctgcacaagttgtactcgaccagtgacctggtggctgcgctgcaagtgagtgagcacgaggtgctggagatgctgaaggaggtgcacgcgtttgaggaggcggggagctggaggctgctgggaccgaagtaccagtcgcaggtgttcacggacatgctggatgccatcgtccagcacgactggaaggtgttgtcggagcctggagtgcctgtgaagaagttcctggcggagctggacgagccgctcgtggcagttcgacagtgctgcaagctgtacggctcgctagcggaagttaacggcgaggaccactgcacgctggaccctgtcaaggtggctacattccgagcgaagtctttattcgacgagcaggcagcagaggcgcagttccaagcgcagcagcagcatgtggcgctgaatcccgccgacgccggttgggaactggacaacttcatggacaagtggaaggtccgggtgcctgacagcgtgaccgtgagcttggacatgctcagcggcctggtgcttgtcaagccgcaggcggcaggcaagcctacgcgggtcgtgtacttccctgaagaagaactctcgcccgagcccaagaagcgattcgagcagcttttcaagatgcaggagaagtggaccatcaagcagctcgagccctacatcaagtgcgtgctgtgtcgtgccatggctgcgaatattctactcatttgctaatgctcaatggtgtattgtgctccaggtcgttagttacgcccagcacgacccaagcttcgctgctgctcaagcacacgcgctcgtcgcgacaaggcaactcgaccgagaagctctacagtcgaagataatttgctaatgggtgcctctaacgcaggcaataaagggcactacaactggctgatgatggtgttttggtacagtatgttaatcccttagtgctggagagcagcaacgagcacgtaggcgctagctgctctccgagacacaccaaagggttgagctttcactttgggctcgtgcatgaaggacgttgcgacaagatggcagcgagctgccagtcaccgacccaaaccgaggcagagccgattcataaactgcggaatattaatacatgtacaaccaaaagcaggtttttcgtagacagcaaaaaggcaactgaggagctcccgtagccacaggtttcgacgagacattgatgttacacgaaggttacctcaatagactgtagccatatatggactcgaatgttacgcgaagcgcccccatctttagcttgaagtgggcgaaaccccgtcgactgctgtagacgaccaggaggcagtcgtcctcatccttgttgcgctctagcttaacacatccaaacacgatggacagtgacagctctctgtgctgggagaatatcccgttcagcagcctgaccgtatgcgagaccatcggcgggggtggagtcgcgctggtgcaccgtggaatctaccggaagcagtcggtcgcattgaaaactctggtgcatgctccagctaatgtgtgttcggttgcatcatgatccctggcactaatcgttattgtttcactcgtgacaacattgtggctacacagtttgaccctcgcgtggatgaggcgctcaaacaggaattcatggacgagctgcttgtcatgaggtctgccctgcttgtacaacgcattattgtttcttctctaatggcattttaattgcatttgcagcatactgaggcaccccaacgtggtcactttgatcggagcgtgcttggagcctccgaatctgtgtatggtcatggagctctgcgactactccctgcaccacttactgcacgggacgaacacttacttgagcccgcagcagttgacgcgaatcgcggtaagcttgatttcaaatcggctgcacacgacttcctcgatgacggaatatgtacgcacagggagatgttgcaaacgggatgcgcttccttcactcccggaagccagcagtgattcaccggtgcgttaattctgcagtgattcctgctgaactggcactgatccacgcggcttatttgtatattcatggcttctgaatgcagcgacctgaagagtgccaacgtgctgcttgacgcgaaaggcgtcgcgaagctctgcgattttggtctcgtccggtacgccgaagagctcaattaattagtgtgatggggaacaatctaacttgactacatactaccgtgcgtagcaccaagtttacaacggcagggactcccagttacatgccaccggagctgctcagcggccagccgttctccaaatccgtggacgtctttatgtttggcattctcctctgggaggtaggcactgcagttccaaagtccgtgttgattattttgccaaatgctgagttgtgatggtgtagattttcagccgagacattccatttcgaggatatgatgtctcggacatcaagtggcgggttctaggaggcgagcggttccgtgttcccactgtcgattgcccacgcgagtgccaggtcagatcgttatttttttgcatttttcaagtatcaccctcttcctaatacaatgactgtgcttgcattctgtcaggaattaatgaaacaatgctgggacggcgaaccgagttctcgcccgacgttcgaggaagtgtgcgaaaccttacagagcgtcacttttgccaggtcgtttgaggcctctcagaacgtcttcgaaggcgacgcgctcgattgtttgctcaacgggaagtagctgcatcgaaacctaattcgctacttcgtcactatcctaagtaatgcactggcttgcttcagttaagccgtgtccttgacccactggtccagccccaggtcgttccagcgatccaccttctcgtcggcagcccacatcggcggctcacctgcatccgaaatgaaattagtaaacaaatattatcctaaaacgccgcaccaatccacctacccgtggggctttcgctgccatttggatcgacatctagcgccggcggaacctcaatctctgcagcaacaacagtacagcagctcagcgtggactcccgatcttgaagatgtcaattcagacactcttaccgtcgtccgacagcgtgtccctgatccacgcgtcgtccacgatgtccaggtagtgcttgcgcgggaacaaactcggcagcttgctgtcctgctcaggccaacattccactctaaaacttagcaactagcgtctacaatccacgaccttcctacagttgtggcgcaccatcttctcctcaagagcagctatgttatatagcacactatcgaattccttattttgggcaaaatcaactgagtgatcttcactcacgaaggtctcagaacccaaaataaaggtcaagcggcagttgagtgcaccatttccagttcgatggcgtcccgagcaggtcaacagcagcgcaaacctcgtcgagggggcaaaacccgcccttcggggcgcagagatgaccctcccgaagtccgtttgtccaagacattagcctacgctctgcgtcacggggcggaagagttgcaactcgacatgagaccgtctgggttcgttccgctggctcaactgctggccctgccgctgttccagtccttcagtgagcagcaggtggacgacgtggtgcgcaccaacgccaagaagaggttctccatcacgacggacgcgaccggagccgtcaagttcatccgagccaatcagggccacacgttgcagttggttcaggacgaggagctcctgaccccgttggaagcccccgacgccatcgacaagtgcgtgcacggcacgtacctcaagttctgggagagcatttggagctcggggctgtccaagatgcagcggaaccacatccacttcgccgagcgggaagtcatggacgacgaggtggtgagcggcatgcgctccaactgcgacttgctgctgtacgtcgacttccccatggcggtgaaggacggcatcaagttctacaagtccagcaacaacgtggtgctgagtcccggcgtgggggacaccggggttatcgaccgcaaatactttttgcgagctgttaagagagatggaacggtggtttacgagcgagagcagtgaacgcagtaacttcaattttctttaattcgttttccgtgcacactaatgcaccacgctgtgggttattaaatctccacttcttcttcttcctcctcttcctcttcgtcgaactccttgatgtgcagcagtacagctcgcttgatggcctccgattcagcttgggtaaattcgtcctcctccagttcagcggacgggaggaactgcgcctcctcgctctcgctgttactcgggtctccttggaagtggccggcagtctcgatcgctaggtcctcgtcgctaagattgttgcagaacgggttgatgttctcttggaacagcgaagtcgggtcttgtcggttggtgtcctgcagccgctggaacccgcgacgacgcgaaggcatgcggttgttaatggccatcccgagcgccacgagcgccaagcctccaggaagggagaaccaccagttggagacctccttagggcgatgcttcgcagggtcgctgtctttggtgtcgtccacttgggctgccgctcctgcgaagttcgcattggcgatggccgtcacctgttcgtacgcagcctcgtcgggtgtgtggtctgtctggtcctgaagcagcactgagatgtcgttgccattggctttcggcagcacgtgggcgttggtattgccttggcctcctgggttcaacttcatcgaagtaccgagaccgacacacgtcgcagcgtccacgcagaggtagcacccggcttgcagcgcgaagagcgcgttgccgctgccgcacatgacgtagctcagcgagtccggctcgacttgaggcaagatgacgccgcatgaaatgccaagcggctcgccgtcatcgcagagcgtgttccggtcgcccaaggctggcgacgctgacagcagcacgagcaataacgcgaagtttcgggcaagcatggggtcttcttgcctatttgacacgcaaaagccgaagtgacacacacgatcggccaaagatcgcgatgatcttgaagggacgcaacggagaccgtcgcattccatgaacgagcggtcgacgttgattcattctgttccctagcagcgaccctcaagctcaagcgcagttagcatggtaagacaggcaggaatctctgagaggaattgtgctgggctttggctagactaaatggcgatgtcttcgtgctcatgatggtgactgcttcatttcggtgcaagtagtcggcaactctttcggaggagcacgagcgcgagctcaggaagatcttcgacgactacgacaaggttcatagcggtgcgtcgagagtgcgttgtgcgcagctaatgtcagggtgttgctgttctttgttatacccggtcggatgttagggcgggtctggagacatcgacatcgatgaagtaagtgctcaatgaatgaccaggtgcctcttcacccgactttcgggacgagttaatttatcgcgttgggatcgcagctccgggacattgcagaggatctcggtgagccgctctcggagatcgagctgcagtatctggccaaggaattggacacggacgagaggtacgaagctgacgtcgcagtcgatgggtttcctgcccgaggttcagatcagaagaatcaacctcatcgcatgccgtgcgcttctttcgcagtggttccatcagctggacggagtttatcgcgtggtggaagctaccgttctagctagagcaggaagaagagcggaacagcatctccttggcgttgaatgacgctgagtccactatttttgaggcccaacgctcctttcgagcttgcgatggtgcttgccttccatgcatgcatgtagccccaatcaatacaacaagtccagatgggcccaggttgttgaaagacattcctgtcaaccattgcactggtcctgcttgaagttggtttcgcgactataaatttggtcagggttcttcgtttcaaaaccaacacccagcccacgcgacgcggccaagcacgtctttgctgggttcatgcagctatcttcaccgccagactcgccttgaagtatcgcatgctgcgctggtgaacatgccagcagaccaagagcactaaaattggccttgaccttcgtgactatcgcagtgaaacctcgcctagctgctcgttgaagccctgcttcgtcccacgcgcccagcaagttgagtcgggtgatccggcaaagcaaggttcaccttgttccccgcatgcggtagctgctcctaggttagctcggcgttcaatttccagttcccgagtctaggtcagccgtttattcctccccacttccgtgcattccactttcgtttggcatttcaagcatcagcagacagaaacaaatgggcagagatgaacgcagcgcgccggtgatgaccgagaacggcttcaccatcaacgggtgcagcttcaacgtagaccccaagtaccagcccatcgacgcgatcggacagggctcgtatggtgtggtgtgctctgttcgcaacaccgagaccgatgaaaagctggctatcaagaagatcacgcccatggctggagatgaatgggacgccacgcacacactccgcgagattcgtcttatgcgctgtcttggagcccacgaaaacgtgagtcgttttcagcttgcttgtcggttgactgagcgaaccccctaatattttgctgttcaccacagatcatttcgctgaaggacttgagcatgtgcaaggagaaggacgagctctacatgatgatggagctagccgacaccgacctgcaccgccttattcaaagctcttgtccattgaccgagggacacatccgcgtcatcatgtaccaggtactatcaggagtcaaggcgatgcacgacaatggcgtactgcaccgtgacttgaaacctggaaatctccttctcaacaaagactgcgaactcaagatcaccgactttggtctcgcccggatgatgcctaagaaggcccagctaggactcgaacaagctgccaacgaagcaccgtccatgatgaccgaatacgtcgtcacccgctggtaccgaccgcctgagctcatgttggcgcccaacggtagctacgacggcgccgtggacatgtggtctgtgggttgcatccttggcgagctggtctcccgaaagccgctgttcccaggcacagacttcatggatcagctcacgcgcgtcttccaggttctgccggttcctgagcctgaagaccgcggctacgtcatcgagaaggacgcacttaaattcctgtcgtcactcccagctccagtccctggtgctctggaaaccaagctcggtaacactgctgggccgcaaacactggacttgttgcggaagctgctctgctttaatccgaaggaacgcatttcagcggacgatgccctggcacacccattttttgagggcgttcaggacgagtggggcgagatcacgccgctcctgttgccgcattcactcgagtttgcattcgaagcgcagtccctcccgctcgccactctacggcagtatatctgtgaagaggtgcttgcattcgccaccaagacaactaagcgtcagccggaaccccacgacaaggagcctcaagccggcaaggcggagaaagctgcggcctcgaaagcgtccaaaacatcgaatacaggaaacaacgatacccccgcggtactcgagaacgactgccctgctggctcaggcttcactctgaagggatgcaacttcaacgtccctgcgaagtacaagccactgcaagtccttggtgaaggatcatacggcatcgtgtgtgccgcaacagataccgacaccaagaaaaatgtcgccatcaagaagataacacccatggctggtgacgaatgggacgccaagcacacgctgcgtgaaattcggctaatgaggtacttcggcaagcaccccaacattgcgtcgttgcagaacctgagcacttgcatcgagaaggatgagctgtacttgatgatggatctcgtggacacagatctccaccgtctcatccagagtaagacaaagctcgaggaagctcacgtcgcggccatcatgtaccagttgctttgcggtgctcagactctacacgagaacggagtgctgcaccgcgatctcaagcctggtaacattcttgtgagcaagaattgcgacgtcaaaatcaccgacttcggtctatcgcgttacattccacacagcgaccgcaccggagactcggtcacttcaccatcagcagaccaagatggccaacaatcgcgccgtgcagtcgacaagacacaggcgttgatgaccgaatacgtcgtaacgcgctggtaccgcccgcctgagatcatgttggcccccacagggacgtacaatgaggcagttgacatgtggtccatcggatgcatctttggtgaactgctgaaccggagaccaatgttcccaggtgcagacttcttggatcagctctcgcgcgtcttcagtgtactgccggtgccgccgcgagacaagcgtggctatgatgtcgagggagatgcactggcgttcctcgagagtctgccaccttgctcgccttcggcactcagcaagttgttccgtcgtgcatcaccggaggcagtgagtctgcttcgtcgcttgctgtgcgtgaatcctgctcgtcgcatctcggcgaagcaggccctggctcacccttacttcaagagtatccgtgctcagcttggtgagcctccggtcttccacgtagacaaggccttcgacttcgagtttgactaccaggagttcccactggcgcatctgaagacacttattcaaagtgaagtcaagctgcttcagaaggatggccttgcttctccaattgcaccacccaaaccagttgcaggtgctgaagctccacaggagaccgaggacatcgataactccagcccagaaccagtcaagcctgtggccaagcaggaaattgcttcaagggttggccgcgacgaggagctccagaacaagttggcggaggcccacgaagaggctgctccggctccagcacccgaatatgactcaggaattgctgccacgaagacgaaggcgcatgctgatcctgaagtcgacgagggcgagccagcaacttcggactcggaatcggacggcactaagcaaaacaagcagcagcaacaggaggacgacgaggttgaggtggcaactcaaaagaaggaaccggcgcctgtcatctcgggcaagcagaacaatgacgatgatgaaaatacgcacacgaatgtcaagaccgcaagtcgttcatcgctgcctgggccgcaagcatcagccgttgcgaacgcttcatcgtcgactgttgcgccacgccgggcatcagcgtcttcaaccagaaccactaccacgtcaagttccttggcacgccttaacagtgctggaactactgcacgccgtagctcgactgcgtcaacagcggtcacgagaaacagtaccgggggcatttcgtaccgttcgcagcgggaccctcgcgacgaggacgaagtttcgtctattgctagcacgagcagcaacaaccgcgggcacaacaacaacaatgggtccgactcgattgaacatggaggcaagtggggtcacccgagatccagcgtgatggcctcgacggcttcttcgcggcttcaccgttcaagcggtcacagcgcttcaacttcgtcaatccatgaacgccggagcggtaccgtgaagactgcgtcaacagccacaagatccggaacctcacgtgcatccatgaccagcagtaacaaccagctcagttatcgtggaggcgaatcaatcgatcgcgagtccgtcaagagcgacgcgctgcgtggacccgagcgcgtcagctctacccttactgccgctacagcttcttcgcttcgccggcagtcaaacgctgctggttcagtgagaccgtcttcatctgctcggaaagattctttgcccgagggatggatacgtcgaacgcactcgaaaagcgggcgagaatacttctacgatacgctcaataaagtggcgtcgtggaaactcccggccaagcaccagccgcttgacaacatcttcgcaggcggatcgacttcttccacgtcgtcacgagttgcctatggacaccgccaaaatgtccaagttgtaccgggtacttcgtcgacatcttcgtcaccatcaagcgcacttacgcccgaatcttacacaagtcgtggaggcagcgggtcgacgttgacaagccgacggacagcttctgggtcctccagcaatttaccaaaggaatgggcacgccgcacagatcctaagaccggacgcttgttctacgtcaacctcgtcacgaaccgctcgtacgccaaactaccgtcctcggtcacggctgctatgcttaaccttggccgtgatgccgttgccagcaagcgcgccgccgctgaagccctccagcgaaagaaggcgacggtacctcacagtcctcagttttcacaaatgtcgtggcaacgcaagagggtacccaccaccgatgactgagtgagtacgcacatgacccgctgatgccgctctcctcgttaagctcctgtcggccatgacagctacgacaacgctacatcattttccgtttcacacgcgcttagatttgccttcattttcacacttcatttgaacagtcaatactagtgccttgaatttgcagcttcttgaccttcacgaaggcccataacggccacggtaccggcctttacccacaacagcgtatggacacttacttcttggcagcatccaccttcgcaatcgtgagggcaagaatctttaaggcgtccttcatgtcgctcagctggcagtattcgttgtcaccgtggtatacggagctcttaccaaagccgacaagagtcagatcaaacccaccacgttgcatgtcgcgaaccagaggcaaactatagacaacaacgtagtgttgagtcagcgccaccaagctttcgttgtagactacatgtatcaaaacctaccttccgctgattgagaacggctttgcttcaccaagcacgtcgctaattgccgaatagagagccctatttcagaatggtaagtggtcgttagcaaagcagccgaccaagcatagttacagaaaataatacagatacatacttgtagccaaccgagtcgagtgaacaggcaatgccttcatagtagctcttgtcgaacacaagttccaacttgcctttgaggttttcagccggcagcgtgtacttggacaccgggccgcgatggccttccaacgatgtgatgttcgcgttcagtccgtccacgaaggctgtcatcttcgcaatcatctgcgtcgcatcacacgcgttagcaagccatatcgcctcagcttagctgaatcacataataacaaacctccttcatgtcgtagaagggggagaggcgaacgtcacccgcgatcttggcccatggcggactgcaaaacaccacttgctatcagctatcgcatgcagtagccggaaactcacaaagcacaccacctacatctggttgagtccgttgacagaggattcgatccgcgtcggcttcatcgtggatgggcacgagtagttgtactccttctccttctcgacggggccgaactccttgtagaagtactcttggatcttagtcatggcgtccatggccagctccagtccattaatgcccaagttcggtagtccactgtggaacagcttgccggtcgccttgagcgtccaggtgatagctccggcggtaccgatgcacggctgactgtcggagcaatcgacccagaacactggtccgttcttgatgaagtcgatcttgcccgactccatcagcgtctcgacgcccactccttcaatctcgctgttctcctctgacgcaatcagcacgcacaccacctgcgtcttggtcggcaccttctgcttcgccagctccttgaacagcactgcaaaacaataagtaaggaaaaaagtcctatcctctcaaacttcttcactgtagctacctacacgtcagcagcgccacgtgaccgaggcagtccgtggtgccgcgtccgtagagcttgtcgccctcgaccgtcagagtgaaggggtctctctgccagccctcggggttggccggcaccacgtccatgtgggctcccaccaacgcgagcgtcttgtccgccgcggccgagggcggcgcatacttgagaatgacgttgcctcgacccgccacgaactccacgcgctccacgctgagctcggcgcccgtgaagggcttgagctcctccaggacaaagtccgagacgaggttttcctgggggattagacccagtccgggcgcattttgcactttttcctaataaataagggtgggagtgagacggtgagttttagagcgtggttttgtggggtctagagggagttaaggcgcaggagttgcgcggggataaggagagggaaaggaagcacgtaccgagacgctgatgagcttgcgcaggagctccacgtagacgctctcgtcgagcgcgaagtcgtgcagcgaggccatcttcttcttcttggcgggaggattcgaagatgaagttgcggacgaggaggagtgatggttggtagctggtggtgattggttgaaataggggccaatggacgagcgggtacactcatcctgtagacgaaagggtcagctgttgaagtgttgggtcaaacaggtcatagacaagggcaacaggtgcaaggactcatcgcgttatgtagatccgtgcgtttcctaggcggaggtggcggcctcgacgttggcgacggtgcgcgcgaggatcttgatggcgtccttcatgtcgctcagctggcagaactcgttgtcgccatgatacacagagctcttgccgaagccagtcagcgtcaggtccagacctgcgcgctgcaggtcgcgcacaagaggcagactgttgtagtagacgcacacgggtagtgaggttagtttatcgtcgagttagggtgcgaggtggacggtagcagcccttacctgccactgatggagaagggcttggcctcgcccagcacatcggcaatggcagcgtgcagcgacctgaaggaaaatatacgtggtgtgagaattgtactcgttggtgtaagatctcatagcagcacgaaacttacttgtagccgacggattcaagcgagcacgcaatgccctcgaagtactgctcctcaaaagtaagctccagcttgccattccagttctcggcggggagagtatacttagacacagggccacgcttgccctcaagcgacgtgatgttggcgttgaggtcagcgacatacgagtgcatcttggcgatcaactaagcacgacgtcaacgaataagcctcccgcattgcatctccaaaagtctacagactaaataatttcgtacgtccttcatgtcgtagaatggcgacagacgcacgtcgccggagatcttgacccatggcggactgtagacacattacacataccacacaaattccgtcagcatactgaacgccccaacttcgatctaaagcgcacgtacatctggttgagaccattcgtggaggactcaatgcgcgtcggcttcaaagtcgacgggcacgagtagttgtactccttctcctgcggcagcgggccgaaatccttgtagaaacgctcctgaatcttagtgaacgcatccattcccagctcaatgccgttaatgccaaggttcggcagaccgctgtggaacagcttgcccgtcgccttcagcgtccacgtgatcacaccggccgtaccaatgcacggctggctgtccgagcagtccacccagatgacggggccgttcgtgatgaagtcgatcttgcccgactccatgagcgtctccacgcccaccccagggatctccgtgttctcctccgacgcaatcagcacgcacacgaccttggtctcgagacggaccttgcgcttggccagctccttgaacagctccgtcatcagcgccacgtggcccagacagtccgtcgtgccgcggccgtagagtttgtcgccctccaccgtcaaagtgaaggggtcgcgctgccagccctcggggttggccggcaccacgtccatgtgggagcccacgtacgcgacggtcttgtcgctgtgggcgaagtccgggtgctggtacgtgatgatgacgttgccgcggccggccacgaactccacgcgctcgatcgtcaggcagccgctgttctccgcagtgtagggctgcagctcggccagcacgatgtcggacacgaggttctcctgcgggacgagccccaggctgggggcgttctgcaccttctcggagacgccgatgagcttgcgcagcagctccacgtaggaggcctcgtccagctggatgtcttgcagggcggacgccatagcttcgtggtggtccggtcttgtctcttcggcggtagatgcgcgaatgacgcacgtctagcaatcggtcggatacactgtacttcgcgtggttcacattcaagttctgattggacgcacaaagtggtacaatgtaccgtgagcgatgaagtggtgcacattacgatcaagttgaagtgagaagcatcatgttcgatgccgcactcatagtgctttgtgagaaggctcctgcgttccgtacatgacagcagcgacctacaggacccgcagtgactgtcgctggctgtcaccaatctatgagcccctcttagcacttggtcttaagttgaattccacgttcgcttatgatccgaagaaagcttagggcaagtaagttatcctggtgcaagctgtacaagctgtacatgcaactttttgatttctcccgactgaggacaggtgtccccgttgttctcaaagagagtgtatctgcgcaagcgactgcttccagcctcgtggtgtttgccttgatgtagtcgagattggactgtatcttgacaaataccatgatagcagcatttcaaccatatcaacaggtagtggggtattttatttcgtagaccagcgataagtgcaagctacgtgtgaaaagttgctgcgaactcggtttcatacttctcgcttttattaccaagcttttgtctccgtagatgcactgcatcccaacttgattgctgttgtcccaattccagcttggtgccgctattaccttcgctgtttcgacgtacctgaacactcactcgcaaacgctgatgggcccgtatcgtgataacgttgataagatactgagcgctgtcaactgaaacactgaaacacactgtcgagctagatgggaatgtttcctgtgaagatagggcaaatactattagatctccacctgcattaaaaaggtggaaaaaagagtaataactccattccactttagctatcttgagcaaatagttgctggtacttgcactgccagttcataagaatagccgcgtcttcttgagccgcaatttaccatcatggcaacatcgacggaggtcgttcgactttcttactgcaacttcgcggtctggtgggttgtcatcctcgctgtccatgtcgtcaccggcgtctacactgcgctctacgcatactgctacttcgagctgcaagacacgtacgtcaacaattatctggaatcgttccagattggcatgccaccgcaataccatcacgtcatcgctataactcacgccacaatggcgacactgcacgcaatgtgtatctccttgatgttggccgggtcattttggcaacgctcgcttgcgttcactccgtggtcttcttgtaatgctgaggccaaacgtgacaaagtggagacttcacgcaccagttccgtgcttcttcagagctttaccaaggtctacaccaagatttctgaccgacgtggcatttgtggcgtgaacggagagcatttccacgctcttctgatcattcgagaagttgttgagacggccctacagaccgtgcaggcgtacggtatgagcatgttattgccacgaactctgttgaatcggttctacgtgttcatgctcgtggtgaactgctggtcgtccgtggtggtttactcgctatttttccgagctgacgaggctcgcagacggctcgtgtgcatcacgttggactgcatcttggatctaatgtcctgcatgggggtggagctgattgttttgttgagttacgctaaagactacgacctgacttcctttggctttgatgactccttgtggcgcaatgacgagtgggccgctcgggctcttaacgagtttcggatggtcgttgtggtgtcgtggtcggatttggcgagtcgagctttgttcgcgcttgggctcgtgctgaccacaacaaatgtcaaagaattacttcaacgcttactaccgaagcgcaatcgcatcaacgcatcgcatggcaatgttatacatgcacagggaaaatttggcggtaaaccagcgtcctctattctacctaaacaagctgaaatgtcaacatcatcacgttcgtccaaccgaagagctctcgctaaaaccgacagctatcgaggcacgaacttacgcacgcgtactgggcgagcattgctgcgtacagctcatgtcttgttcggggtatggggtctcctacttcttgggttccacatccaagcttctatgcagccaacactgccgcaatgtttgatgcaagtaaggccgttgggagcttcacgacccgcttgctacttggtcggtcttgactgctatactttagcgatttcgggcaaggaggagaaacggaaacgaagtggggcgcttttgacagctcaacggttgttcagctgctgatccgacattgtccgagtctcgaaataccaggctctatcagcgagttccacggactacatggcatcaaagtgtacaactcgacaatcgtagactggagcgaatctgctgctctttccaacacataccacccagacataatgtcgctgtatcttgcgcgtgtcaacatgactgatggagtgctgcccctcggattccaatcgacagacttcccacaaaacctgaatgacatcgagctctgcgtcaccaatctgcgcagtctacccgatgatctcgacctcaagtggcatcaacacgctctcatacagattgagtacagtcggtccctcgagtcctgttaaagctagagtccaaatacttggcactgtccggcaacccaatcacggagattcctccagagacttttgaaatcccaggcctgaggactttgggactcggccgctcgacattcaagagctaccgccaaatgtgacgaacctgtcgccgacactaaactaaatcttcctcgactggaccaatatctcattcttttggtcgtgggcggacgagcttataacgttagagacgtgggggattcttgtagctacgggatctccatattgcgtcgatctactaaaaattcaagatgggactgcaagcgctttcagtgtggccccgtcccctgaatacgcctccgtcctcatggatccctcggaggccaacttgccaccgattatctacactgtcggctgtgtcggctacgatggaccttactactacattgtccaggatgatgaaagcatggcgattagcacccctccattactggaaacccgagcttacgccacctaaagctgcagtaaattgagcgatacgaaaatagagtttttcgttgcttggacttggaaagcatcacgcgtccaaacccagtccgtcgaacgcttgaccagctatatgttgagccttttacaagataaacccacggaagtcgtccagctctcttactgggctttcgcgatctggtgggtcatcatcctcagcgttcatatcactgccggtggctatgctgcactctacgcatactcctacgtcaagctccaggacacctccctcaacttctatttcgaatccttccagatcggcatgccgccgccacaccaccgcacgatcgctatcgtccacgccgtaatggctgctctgcatgcagtgttcgtgttcttgatgctgggcgggtcggtttggcaacgctcattggctttcacaccttggtcgtcatgcaatgcggaggataaacacgaagaaaccgggaactcgcgtacaatttctgctgttcttcggagttttaccaaagtctacaccactgtttcggatcgccatggcatttgcggggtgaacagtgattactttcacgtagttcttatcgttcgagaagttattgagacagcactgcggacatcacaagcgtaccgcatgagtgtgctgctaccaaggacgatactcaatcgattctacgtgctcttgttggttatgaactgctggtcgtctgtcgtggtttactccaccttcttcaagggcgacgaggctcgtagacggtttgtctgtgttgtcctggactgcatgctggacctgatggcctgcgtgggcgttgggctgctgatcttgctgaactacatcaaatattatagtcacgacatgcagggctttgatgattctctttggcgcgatgacgaatgggcagcgcgtgcaatcaacgagtttcggatggtcgtcgtgacttcgtggtcggatctggcaagccgagccatcttttctttcggattgatcatgacagcgtcaagcatcaagacgctcttgcagcgcctcccgcggaatgggagcagtgaaggcaaacaatccacagcgccaaatgtacacaacttgcgagaggctttgcacagaaagctcaacaccgttgtccctcagccccctgcagtatctgttgcattgccttctcaagtctccaaaagtaagcttctggtaaagatcggtcgcagctttcgtgccacaaaactacgcactcgcactggacaaaccttactcaatgctgctcatatattgtttggagcttgggggattgtcattcttggattccacatccatgcttcgatccaaccgacacttccgcagtgcttgatgcaagtaaggccgtggggagctactcgtccatcttgctacctggttgggctggactgttacaccttggcgatttctggcaagaaggatgaagtcgaagagaaatggagcgagtttgacagctccacagttgttcagctactgattcgacattgtccggcactggaaatgcccgactctatcagcaagttccacggactccacggcattaaagcttacaacaccactattctcgactggggagaatcggcagcacttacgaatgcgaatcatcccgatcttgtcactctttatcttgctcgtgtcaacatgacggacggggtgctgccgatggggtttcaatcagctgatttcccacaaaatctcaacgatattgagctttgtgtcaccaatttgcgcagtctacccgacgatcttgactccaagtggcaccaacaagcaggtctccaatttgagtacagccagttagtggccattcccgcagtgctattgcgccttgagccgatgttcttcgccttgactgggaatccgattaccgatatccccccagaggtttttgagttgccaggcttggcaaccctcggacttggtcagatgaatcttaaggagctgccacgtaacgtgacgaacttgtctccaacactgagagcgctattcctcgacgggactaagatttccttcttctggccatgggctgacgagctcattacgcgtgacgaggattggagtgttttggtcgttaccgacactccgtattgcgccgacctccaacagatccaaagcgggtctgcaagtactttcagcgttcccccgtcgcttgaattcgcatccatcctcatggacccgtcacaggcgaaccagccaccgatctcggacatcgttcgctgtgatggcttcgtcgggacatactacttcatcaacctggacgacgacaacatggcaatcagtccgccacctccactacaagtcgtaccaccctaaaagcactgttgaacagcagtgtagcagcatctagccagctaatatcccagttaattagcaagatattactgtttgtcaacgactcgtcttcatcttgacatccacaaaaaaaatctttgatgagatgtttagcatcccccctcgctttccagacaacttagaccgcctgggcgtagctgttcatggcggtcgccatcttgatgtcctgcaaataacgccaaaaacacagcatcaacacgaagaacaccactacgcacaagccagcaagaccggatcgtacgttcttggagaggccgccgcagtcgtgcgtgctgagcgtgacgtccacgcggttgtagacgttgaaccactccgggtggtggcccatctgctcggccagcagcgccgtgcggttcatgaagccccaggcctcgttgaagtcgcggaactcgaagcggcggcggatggcgtcgcgtccaggcacgacctcccaggcgctggtgatctgctgcagccccgcggcgcgctcggcgtccgtcagcagcgtcggcacggcgtgggtggccaggccgcgctgcagcaggggcctggcgacgggggcagagagcttgcgcagcacgtggaggctcatggagcagtgcagtctccgttaaacggagggctacgcagggatttttgatactgtactgatgcaccggaaacaactttcgaccaatgagatggacgttgaattgatgcgctagaatccttgatgagacgcccctgtgtccggtgcttcaatgtccggcggctggagaccaaggacgctgtaaatgctgggctctgctgttactcatccctggcttaataatgagggcggagcagtaaacagcgagcgagaacggggtgatgaagaaacatgcagggttcgtttaatgattacagagcgacgtcggcaaccctcgctctcaggggtttgcgtctagttcttgcggctcttgcgcttgaaggccttgagctccttgcggtaggcgtcgccgatctgcgtcgacaccttgcgcaggtccgtcaggcccgagcgcagcgcctcgtcagcaggtgcgcctgcaacagcagcagcaacaaaaacaaacgacacaaacgattgttactcattgctcgctgtactccactcccaacgactggagcttcgtcggttttactgcatttttaccttggcgggtctgcagacggatgtgcatcttgggctccgaagggtgcgggatcgtgtagccgcaaaagtcgacgtcggggctgcaataccacgcaataatcggccaaaacagtcagagaaactgcataaattgcttgagtcgagcgaaatgggcgcgtctagctcgtgtcaatgccccatttcgactgcagaggcacgtacttgcgcatcaggacgtagcgcagcgcattgccgagcgtgtggtcctcctcgtggaacacgtaggtcttggagtagtcgctcgtggtcgtgaacacgtccagcttcttcgcggtggtggccatggctgctggagtcgaggtggaggtgtctgtctgttgcccttatgactggctggggcgctatgatttcagtaaagcgaggtttaaatgtcactaaagcggatctccttcatgtccgtaaaacaaggtactaatatcactaaagcggctcaggtttcatagggtcattcgagagaacacatccaaggccgggcaacccctcggtcgggtggtgacttcttcagggctcggacgatgcctgcgggggcgtccgtggatcgccgcggcagctccgtgtctgcgcaggacgccaagctgtctgtggcgaccgctctgatctcgcgagacgctctggacgccgagatatctgccgagaaccaagacattctggatgccgaggactacctcaccggcgcctcgcgcgggggctacgcggacagcatcatcagcagcgatgcgagcagcgacagcgacagcgacgaggacgaaggtggcgcgctggacgtgacgcagttctcggccgcggagctgcaggagcagatcggccagcagttcgtggagggcatcaacccgtacgtggagcagctggtgggggacgaagaggacttttacgtggaagactcgtcagatgacgacgatgacgagcagcagcagaacgccaagacgacggaggacaaggagaaagagctcaccgagtgggagaatccgtcctacctggtgaaagatctggacacgggcgagagctaccgcgtcgaggagatcgaccaacagtttacgctcgtcacgctggactcggtggcggcgaaacatgagcacaaagaggagcagacggagggggcggaggtgacggccgagtccacgtcgtcgtacttgttgtcgctgtacacggcggatgagacggcggatatcgagattgaagacgacctgccggaagctgaagcgatgaacacggcaggatccatgagagctcgcagctccaacatgtcggcgatctatgcgccgagtgatgagttgccgacagggcctccggtgaagtgcagttttcctgggtgtacggagatgcaccagcgcgtgtcgggatattgtgcggatcatgagatgattgccaaggaagaagaggactcgcgtgctcaggctctgtatctgattccaagcggtgctcgtgcggagtttatcaagatcgggagtcatgggtttgcgtacgatgcgtcgaaccgactgtacaccgtgtacgccatcgaaatgcgctgtgtgcagtccggcgcgacgtgggtcatttaccgtcggtaccagcagttcaaggagctgaacgaccgtttacgccccatgggagtgcgcgttccattgctgcctcctaagaagctgctgggctcgttcgagccggacttcattgcgaagcggcagagcgagctgtcaaactggctccgttgccttctgaactacgatcgcgtggaccagtcggccaaaaatccacacttggtggaggaggtgcgcaagtttttgacgagcaaggccgaccagcccccgcttctgcttgacaggttaccattaaagcgctcaagatttttcggtgcgtcgctggctgatgacgttgacgacgaaacaggacgactatcctctggtaaccagagtgttacccttcaggatttcaagatgattcaggtgatcggccgcgggtcgttcggcaaggtcgtgctagtgggacacaaaaccaccaaaaagctgtacgctatgaagattctgtcaaaggagaatatcgtcaagcgcaagcaagtggagcacacgcgcacggagcgccgcgtgctagggtgcactcggcacccgttcattgtcgggcttcactacgcgttccagacggcgcagcggctgtactttgtgcttgactactgccccggaggcgagctgttctatcacttgtcgcgcatgaagaagctgccggaacacatggcgtgcttctacgctgctgagatcacgttggccctcgagcatctccatggtctcggtgtggtgtaccgtgatctcaagccggagaatatcctgctcactaaggacggacatatcaagttggcggactttgggctcgcgaaggaagggatccgtgatggtgtgaatggtacgaattcgctgtgcgggaccccagagtatctcccacccgagatcttggaccgcctcggccacggaacagcagtggactggtggaacctgggcatggtgctgtacgagatgctgacggggctgcctccatggtacacgaacgaccgcaagaagctgttcgagcgtctccgctcggcgagactgcactttccgccgtacgtttcacggcgggccgaggcgctcattcggcagttgttgaatcgcaacccggccgagcggttggggtcgaaaggcgcccaccaactgaagaaccacctcttcttcgaaagcatcgactgggcgaagctggccaagaagcaggtgacgccaccgtttcgaccgtgccactcggcaatgaacgacggcgaggcgccgctgaatttcgaggcggagttcacgcgccttccgctgccaagcgcggagaacgcggtcgcaagtccgcacagtgggcgcggattgggggcgttgggggtgcggtcacgacgggactcggacacgttcaaggacttcacgtacgagagtcccgggtatctcgagtctgtggcgaagaaggaggacgcctgaactgaggcgtcgtcaggtcaaggtcaagtagcaagtaacaacaggaagaaaggagtatataagagcagcgaaattgaagaagttgcatattgtcgaagctgtagacgaacggaaagactctcatgacgaacgaacacacggcgaaaccctacaacgtcgcgacgcggtcgtggctcgctcgacggttgacaattgctgatgactcgatggtcgactcgaccatcgagtcatcagcaattgtcatgcagccatgacgcgactaacggtcccatcgatacatgcagtccaccagagctaaaatccaggtcggtactcacgagcagacgcccagatactctcacgccagaacgcgaggccatggtggacagtgtcgcgctagtttgggagcttgggccagcgccctatccgtgcactacagagcgctcttgccgtgcaccggctttcctgcctaaaaaactttagtcctggcatcgacaatgagctgatgccttccattgttgctggcgagcgaagcaatggtgcgtgctcctagaagacaaggtgtgactcgaggactcgcgagcgaattgaagtgactttcggtcgctgggtcgattatgccaaactcgagtgctaccagagatcgcgtcgtgccgcaggtaggactacccattttcggagatgcatgcgcgtttaattaacttcaacgacaacgtcgtggggttgccttgctaatcgacggttatgtgcgtacaaggccaccgccagtaaatcacaagtaacgtcgatggaaaagctgaaagacaaaacttgcatacattaggttttccccacagacacattacgttgtccagcttggatttgaagtacctactccagtgtagttattagctttttaattctgccatcgttgtgtgcagccccttcattttgtctataactaactgcctgagatggagttccccaggccgttatactgcacgcggtcactggaaattgcggcagacctcctgacccagaattcttctgtgtaacgttatacgtttctgtgaggtcttcatccacaacttactgctgcacgtagttattacaacaccgttatcctaagctccaaacgagacaggctaagccacctcatacctcctgcttcgtcggtcgcgttgtggatgcaacccaggttgccggaacgggcgatccttcgcgataatatatcacgtgcgagttgttttttttaggatcgagtgcggcatttggtctttctgtcgatggtttgcatgctggtactgtgaatgagtttgcaattgtgctgcaacttacgaccgtactaagccaggcagcgcgctgctccaatcgaggaacttcctgtttttgcttattatccaattcctgctctataaaatgggtcttcccgccgtcatcagcccttttctccatctgatcacgcgtccggattggcccgttcaagtgtcacattgccgtttgctcgggccccagcgtaatcgaaagtcggaacgtgagctggagccgcacataccgtacgtaacattccccaaagtgctcgctgaagctcaagagcgccagttggttcgagccagagctgttcggcacggcacggcaggaccacgaccatggcggcccatgcccatgaggacacgctcacgccgatggagaccatcgagggctcgcccaagcgcgagtgcaagctgcagccgcccagcctcaagcgcgtggtgctcaacccgcgcgcgtacctgacgcccttcgtggtcttcataatcttccaccacctgcccatgttcctggcctacgcactcatcgacaagccgcacgagggctacgagggctgccaccgcctcaaggagctcttccgctggctgcacgcgtccttcctcttccacctcgtgctggccgccatgatgtccgcggccgtcgtcttcacgctcgtcacgcgcgtgtaccacgagcggcggcccgagggctggctcatcctcgccatcttcctgggctactgggccaacctgggctggaccatctacggagaggcctcttttcgcaccgacacgagcgtgtgcggggacgtcaactgggagcaggtgcaggaccgcgccgactcgatcggctacttccagcacttcgactttgtcttcacgctctgcatcatcggagcgggggcctgcacttcatatatgtgcggcgtgcacagtggagacgacgctggagaggccgagaagcgctggcagaagcgctgcatgtgctgcttccacgccttcacttgccataagacggtggagtacgagggagacgacgatgtcttcgagacgcttgggcgcgtgctgggcaagttcttcgtcgtcagatataagacgaacagatacgaaggtctgagcttcacggatctaaagtttagcttggacttggtgtccaaggtccagaagaaagagcgcgaagaggaggcagagcgtaaggctgaattggcagcacaggggatcccgaccgtgaagcacttcgcccccgatgaggaggagaagaggctcagcgacttggccttctactgcagactggctattggcatctacggctggccgatctacgtgtggtactcgccgtgctactggttccgcgtcttcgggtgcttcaagaaacctctgggggaacaggtcttcgagcacgacaacttcgtgcacggcaaccgcgccagcttcgtcaactacactggcgtcaacgactcggatctcgtgtacctcaactgctacaacttcgtcttccaggcgccgtactgcatcgtcaaggacaagacgcgcaaggagctcatcatcagcgtgcgcggcagcatgtccttctacgacttcgtgacggacggcttggcgcagatcgtgcgcatggaacccagcgagctgccggacgacatcccgtactcttttgacacgcggacgcactatggaatgctgcgtacggctcgtcagatcttcaaggacttgcaggagggcactcgcaaggccgtcttctggaacttcgcgatggccaactgctctggcgaggctctaatggacgacgactggaaggttgtggtctgtggccactcgatgggcgctggcgttggctgcatcctcgccatcttgctccgcaaggtcttccccaacacgaaggcgttcttgtatgcgccgccgccgctgtttgaccccgagacggcggaatggaccaaatcgtttgccaccactgcagtgtacggcgatgacatcgttcctcgactatccattgccaacatggctacgctgcgtgacgagatggctgtccactacgatgccgtggctacggagccgctgtacaaggtgaagtatggcgtccacggcaagttgaaagacctgaagcaagagcgtcagcagccggtggcagccgcaggacctgatccaagcatgcgcgaaactttcggcagactgccgacagtattggagaactccaacacgggcacgacggtggtggacacgagttcgggctccttcgtcaactccaactcgttcgtcaacgtcaacggcacaccgacggactttgcgtcatcggggctcaacgtcattaatcgcccctcacgcgatctgagcgacgccacgatgatcacgctgccccaggaagacttcacgcaagaggtggacgtgcccggagagatcgtccacattacgacggtcaagatggcgcgtcgctgcggctgcaccgtgttcttgggcgagcagaagctgcagtacacgctgcgcgacgcgagttacttccgtcgcatctgggtcacgccgcgctcgctgcaggaccacatggtgcaccactacgaccgcaagatccgctacctcgtgagcgactgcatggacttcgaaaccccagtagcagcccaccgtacgagcgccagcaccagtaccagacccttgtggatcgatgacagtgatgccaccgtcgatggcaaggacaagacgcccggcacgcctcagacggactacaaggagatcgccgccgtcgtgtaagctcactccatgcaaactacctccaggctaagtagaggaggactgtacaaacaaagtagtatttactgtaacgcgaatgaagcgtatcatcaccatacatgtgcacaacctttccaccttcaatttgaaccgattggagagaccagcgaatcgtttggatgaagttttgagtttcgagtgtactgtaatgcccattgctagaagtgcgtcattcgcgaagagaccaacaccaccgcgtcatgcaagacatccagctggacgaggcctcctacgtggagctgctgcgcaagctcatcggcgtctccgagaaggtgcagaacgcccccagcctggggctcgtcccgcaggagaacctcgtgtccgacatcgtgctggccgagctgcagccctacactgcggagaacggcggctgcctgacgatcgagcgcgtggagttcgtggccggccgcggcaacgtcatcatcacgtaccagcacccggacttcgcccacagcgacaagaccgtcgcgtacgtgggctcccacatggacgtggtgccggccaaccccgagggctggcagcgcgaccccttcactttgacggtggagggcgacaaactctacggccgcggcacgacggactgtctgggccacgtggcgctgatgacggagctgttcaaggagctggccaagcgcaaggtccgtctcgagaccaaggtcgtgtgcgtgctgattgcgtcggaggagaacacggagatccctggggtgggcgtggagacgctcatggagtcgggcaagatcgacttcatcaagaacggccccgtcatctgggtggactgctccgacagccagccgtgcattggcacggctggtgtgatcacgtggacgctgaaggcgacgggcaagctgttccacagcggtctgccgaaccttggcattaacggcattgagctgggaatggacgcggtggccaagctccaggagcgattttacgaggacttcggcccgctgccgcaggagaaggagtacaacttcttgtgtccgtcgacgatgaaacccatgaaggttgagtcgtctacgaacgggctcaatcagatgtacgtggcaaatggaggtggggggtttaatgctaaacatgctctgaaaggtgttggttgcatgcagcccgccgtgggtgaagatcactggtgaagtgcgtctgtcgccgttctacgacatgaaagacgtacgcattatattatgtcgttaaatatggatgagctgcagctaacttgctcgtgtcgtcgctactgtagatgtttgccaagctgaactcgtacgttgacgacctcaacgccagcattacgtcgttggaaggcaagcgcggacctgtgtcgaagtacactctcccagatgagaattggagcggtaaactggagctctcattcagggagcactaccttgagggcatcgcatgctcacttgattccgtcggctacaagtaaggttgccggtcatgcaagcacatgtgtgtgctgtgttctcattcgcatccttacgcactgttgctgcaggtcactttacaccgccattgccgacgtactgggcgagaccaagccgttctccataatgggcaggtaagaccagtctacttaagtatcacaaaagcttgcatacgatacctcttaatcatatttgctgcaacagtctgccgcttgtccgcgacctgcagcgcgccggcttggacctaacactcaccggtttcggcaagagctctgtgtaccacggcgacaacgaatactgcctgctgagcgacatgaaggacggcattagaatcctcgcgcggactgtcgccaacgtcgagaagtctgccacatccgcttaatccacaatattggcccgtgctgtcctaagacgctcgcgaggaagaacagcagcggcgtccatggcatttaagctggtttcgaccaagaggacaaactttctgctgtcttgggtgcccgaatgctgcagtaatccctgataccagaagtagtggtgtagcttggcattgtcggcttgcccaactgtcgttgcgattccttaaatgcactaaggcattcggtgaatggcgtggtgacggccaattcccgtgaaaattgagtataccccacgcaatatgcagctttctctaattcatcaccaataattactacttcaagttgctcctcgcctacgagttcacccggagtattcctggcgggccagcgccggtggagaactgatggcattttcactgtcttcataggcaagaggataaaacaatcctccacctgaaggaagcttggttttggtgttgcaatcaacagtactcgatatcttgccaaggttatcacgagacgggtccatcagcgtctgcgagtactcgggtgttagcggaacagcgaaggcagtagcagcaccagtttgaattttagcgagatctttgcagtaagtcgagcctccagcaatccatggagcagtctcggtcgttgaacgctccaccaactcgtccgcccatgcccagaagaacgaaatatttgtatcaagcataaaaacccacgataaggctgtcgatagttgtcacattttgtggtagctcctgaatctgggtatcaccgatgccgagtagagccatcccctgcacctcaaatatttctggtgggagttcctgtatcgggttgccagtaaccgcgaaatgatatggttgaagctgtaagagaacgagagggaccaaggtgagttggctgtactccacctgaataatcgcgttcataggccatttttcatgcaagtcttggggcatttcgcgcaggttcgttacgcaaaactcgatgtcgtataccgttgaagggaagtccgaagactggaaaccagtgggcattaatccgtcggtgaagttcacacgaacagcatacaacgtcaataagcttgggtggttcgcaccagtgattgccgccgattcactccaggctttgatagtcgtattgtaaactttgatcccacgaaggttgtggaattcagtaaaacgggctggaacttcgagttcggggcaatggcgaatatacaactgcacaaccgtggagctatcgaattctcgccatttcccatcgatctctgccatcgtacccgatagatgaaaagcgtggcaatcaagtccagctaaatagcacgacggacgggaagccatccacggtttcactggcatgaggcactgcggtagcgttggctggatggacgcgtcgatgtgaagtgcaaggattataatcccccaagctccgaacatcaaatgaaccgtacgcaggaccaagattctacgccgggagccacgatcgcgagtaaaactatattgctgagtgaaagactgaggtcctggtcgtgacgcagcaagagcagatggagtcggagctatcgactgcgcatcgaaagtgtgcgtatttttcactgcaacagaggtgataccagatcggctgacgctgtttctcttatgtgggagtcgctgcagtagctccttcatattcgtcgtcgccatgaccagtccgaacgagaagaaggcacgactcgctagatccgaccacgaaacaacaagaaccatctgaaactcgttggatgctcgagccatccactcgtcattagaaggtgccacgtagctaggctccgccttcgttctactgaagctcctgcgtaacttaacaagatgataacctctacccccatgctcgccatgagatcaaggtcgcagtccagcacgatgcaaacgaatcgtctgcgagcctcgtcgcccttgccaaaccaggagacaatgatgggagaccagcaattgatcacgagtaaaatcacgtaaaaccgattgagtatagtagcttgctcatccgatacgcttgtacagtttgcagggctgtttcaacaatttcacggatggtgtgaatcacgtggaagtggtctccgtttaccccgaaactccatgccgatcagcaatgacgccataaacgttggttatactctgcaaagtagctgacctcgtgcgctccgactcggatttcgtactcccgatgccgctgttgcaggacgcccaaggtgtaaatgccagcgatcgatacttaagagaaccggcaaccaggagcaaaatacaaactacgtgcggtacgaccatgaagaannnnnnnnnnnnnnnnnnnnnnnnnnnnnnnnnnnnnnnnnnnnnnnnnnnnnnnnnnnnnnnnnnnnnnnnnnnnnnnnnnnnnnnnnnnnnnnnnnnnggtggagaactgatggcattttcactgtcttcataggcaagaggataaaacaatcctccacctgaaggaagcttggttttggtgttgcaatcaacagtactcgatatcttgccaaggttatcacgagacgggtccatcagcgtctgcgagtactcgggtgttagcggaacagcgaaggcagtagcagcaccagtttgaattttagcgagatctttgcagtaagtcgagcctccagcaatccatggagcagtctcggtcgttgaacgctccaccaactcgtccgcccatgcccagaagaacgaaatatttgtatcaagcataaaaacccacgataaggctgtcgatagttgtcacattttgtggtagctcctgaatctgggtatcaccgatgccgagtagagccatcccctgcacctcaaatatttctggtgggagttcctgtatcgggttgccagtaaccgcgaaatgatatggttgaagctgtaagagaacgagagggaccaaggtgagttggctgtactccacctgaataatcgcgttcataggccatttttcatgcaagtcttggggcatttcgcgcaggttcgttacgcaaaactcgatgtcgtataccgttgaagggaagtccgaagactggaaaccagtaggcattaatccgtcggtgaagttcacacgaacagcatacaacgtcaataagcttgggtggttcgcaccagtgattgccgccgattcactccaggctttgatagtcgtaatgtaaactttgatcccacgaaggttgtggaattcagtaaaacgggctggaacttcgagttcggggcaatggcgaatatacaactgcacaaccgtggagctatcgaattctcgccatttcccatcgatctctgccatcgtacccgatagatgaaaagcgtggcaatcaagtccagctaaatagcacgacggacgggaagccatccacggtttcactggcatgaggcactgcggtagcgttggctggatggacgcgtcgatgtgaagtgcaaggattataatcccccaagctccgaacatcaaatgaaccgtacgcaggaccaagattctacgccgggagccacgatcgcgagtaaaactatattgctgagtgaaagactgaggtcctggtcgtgacgcagcaagagcagatggagtcggagctatcgactgcgcatcgaaagtgtgcgtatttttcactgcaacagaggtgataccagatcggctgacgctgtttctcttatgtgggagtcgctgcagtagctccttcatattcgtcgtcgccatgaccagtccgaacgagaagaaggcacgactcgctagatccgaccacgaaacaacaagaaccatctgaaactcgttgaatgctcgagccatccactcgtcattagaaggtgccacgtagctaggctccgccttcgttctactgaagctcctgcgtaacttaacaagatgataacctctacccccatgctcgccatgagatcaaggtcgcagtccagcacgatgcaaacgaatcgtctgcgagcctcgtcgcccttgccaaaccaggagacaatgatgggagaccagcaattgatcacgagtaaaatcacgtaaaaccgattgagtatagtagcttgctcatccgatacgcttgtacagtttgcagggctgtttcaacaatttcacggatggtgtgaatcacgtggaagtggtctccgtttaccccgaaactccatgccgatcagcaatgacgccataaacgttggttatactctgcaaagtagctgacctcgtgcgctccgactcggatttcgtactcccgatgccgctgttgcaggacgcccaaggtgtaaatgccagcgatcgatacttaagagaaccggcaaccaggagcaaaatacaaactacgtgcggtacgaccatgaagaaccgggcggtagcaatcgtgggatggtctttagtcggcatgccgacgcgaaatgggtcctcaaagttccagtagctgtacgccgctgtgaggttgtagatgcaggtaatcacgtgcacgcccaagatgatcgcccaccacagtgcgaatgaccagtaggaaagtatcacgacctccgtcgaagagttggaagtaaatttcaccattgtcggggaagctggtggcccctggaaaacctcagtcagcgagggtcgtcttcgctgtcttcaacgtctgaaagtaaaatgcttcgtcgggtcatagcacatgtatctatcctattcctgtcgttctcttcggctagtattattatacggtcactaaaaaaaattcaagcacggtctgacctaccatcgatatttcaagaacagttatacgacgcagcaacacgattctcataaaaaaatcaatgcatttgaaatcttacgactcgagatgaaagtttttctgcctgcctgctatatcctccaactctacctgtagttcgcagtgccgccgatgcgttccttgcgagctgtcgctttggagatcaccgactcggctaaccgtgaggttgctcataacggagctcacatcggacggagtgcctttccgccgcgttgcaacactgcgaacgctgcgagtgctggcagtggacgagagtgcagccgagttcttgtacacgtctcgtttggcttgcttcttggtaggatccacgggtttcgggggtagcggcgtgccttcgatgtggtccgggaactcgtcggcgtagtcgatcagtccgcccgtgagcacgtaaatgttgtcgaagcctcgctgcacgagcgtgtgggccgtctgagccaccgtcttgtcgtccagatcgtagagaatgacgagcttggactcctggttcttgaacaggtgcatctccggcaacagcacgtctcggttcaggaaattcgcggggtagttcttggctcggtggatgcggttggcagcgaactcctccttggagcgcgtgtccagcacgaggtagggcgggtcgtagtcctccttctcctccgcgtcgtagctcacgatgcgagggccgcagctctcctggttgtcgtcacccactggcactcgctccatggagaactcgccgttggcgcctttgaccatcctcgccaccatttccggctggctggcgctgccagtgtcttcgtactcgctgaagagatcggcgagacagcggcacgtgatgcggcggaaggtctcgtctcgacgcttcaagaactccttgtgggctgtggagagagaggaagttcacggttagattccactcaaacgtgagacagattgtaataacggaacgcacagatcagccgaactttgttcaccgtcgagcccgagtcgatcttgctctgcgtgttcttgtaccgcgggttctgcgggatccgcttctccatgatctgcaaatgtgaagtgtggttgatcttgagggcacctttactccaaggaggaagcaagtacgtacgccaaggggagctttgggcttagcgcggtgcattttgtctagggcgaagcgtcgggtggaggtgccaaagagaaggatgaaatgctagtgactatttaggtagagtacaacggatgagggggtttccagcaaaacgacgtctccaattttggctccggcggcggtggctccttataacgcccaagcagcagtgttgttgaaaacaaaagtcctaattactatcgctaaatctttatctactttggtcgtaccaacgctggtgcagggctgatcgcgttgatgctgtcctccgtgtcaatagggtagaacagtccctcaatccattcatcacagtcgacagcaagccaaatggcatggagattcgcctcggaggaattcatgagactctgcgagtattcgggcgacagcggaaccgaaaaactatcggctgttccattctggatgttcacgaactcgttgcaaaaggtggaacgtgcagcaaaccaaggggtagttaccattctctccacgagttcgtccgcccacctccagaagaacgagatgtaggtgtcgccaatgtaaatcgaagtcagcgtcgacgatagttgcgtgacattttgcggtagctcgttgatgttcatctcgcttatcccaagaaacagcaagccttcgacctcgaatatctccggagggagcgcagtgatcggattgccagttagcgcgagatagtacggctgcagcttcacaagcgccagaggaacagagagtagctggctgtactccacttggataatggccccggacggccacttggtgtccagatcgtcgggcaactcaatcaaattggtcgcgcacatttcaatgtcgtacactgtccgtgggaagtccgtggattgaagacctgcagggagaagtccgtccgtcatattcactcgaacgataaacagcgacgacatcgctgggtggttcgcgttcgtaagggcagctgaagcaccccaatctttgatagttgagttgtatactttaacgcctcgaagagcatgaaatttaccgataatgtcaggcacttcaacggcaggacagtggcgaatgagtagctgaaccaccgtcgaactgtcgaattcgctccacttcgactcgacctcctctagcgccccagatatccccagtacgtggcagtctaggcctgccaggtagcacgacggtctagtcgcaaaccacggcctcacttgcatcagacattgcgatagtgttggttgtagggaagcgtggatatgaaacccaagcactgcaatcccccatgcagcgaataacacgtgagctgtacgcaaaaagacccgctcccaccgcgattgaatctttgcatcgcgatagctgtctgagcgacgcaataacgttagtactggccttggtactatagcggcgcttgaccgagtcgatctgacggtagtgggggagcgtcccacgagctccttcatgttcgtggttgcaaggatcagacccagtgagaaaatggctcgactagcgagatccgaccaggagaccacgagcaccatcttgaactcgttgatagcacacgccacccactcgtcgtcataccatatgaggttgttgaacccctcgagctctcggtcatattcgctcgcgtagctcatcacaaccagtaattcgacgcccatacacgccatcagatccaacgcgcagtccaacacgatgcaggcgaagcgccttcgtgcctcgttactgcggaagattttcgagtagattatgaccgacgaccagcagtttactgcgagtagaacgacgtagaagcgattgagcaaaatccgcggcagtagagcgctcatacgataagcttgcatggtttgcaacgccgtctcgaggatctcccgacaggcaaccaccaggtggaaatgcactccattaactccacaaagaccgcgtcgatccaccatcatagagtagagtcgaggtagaatacccgatctaccacggctggtttcctgcttcgtgttgctgtccacgttcgatgaagaagaccacggggtaaaacataacgatctctgccacaatgagcctccaaccattagcaaggcacacgcagcatgcatagcggacatcaaagcgtggacaatggcaatagtagagtgatactgcggcggcatgccgatctgcaacgcatcaaggaacaagttcaagaacgtgtactgcagttttcggtagcaataggcgtacaacgcattgtaggcgcctgtgaccacgtgaacagccaagatgagaccccaccacacggcgaaagacccgcgagatagccgcacaaagtccgaggaagtcttctccgccattggacttggactggaatgagctttcgctggcattattagatagatgcggcgtgtcggattctggtgatgcccaatcgcatagctttcttgtcttgaagtaccaatagctatacttggatcgggaaagctggtgggatgctgatagcgctcgtgctgtcttcgatatcatgagggaagaacaatccagctaaaaaccgcccaaatgaaaaaaaacttgctccataatttgctacgtcacgtaaacccttcgttgttggatccttcagtatcgcaaaaacagtggtctccgcaaccaagttgctcgcgagttcacggcgaagagcaatctggagcaacctgtccttttcactgatctacttgacgaatgcacggcgcaaagattcagcattcagaccttctgctacagaagatattcgcttgtacgaagtaccaaatatttttcccatctaaagtgacgttgtcgtgatgggtcgctccaatccatgcactatcacattttgtattgtagcgcgatcgcgtcctgttgcatgcatttcaccttttccgtcaaaatagatttctgctcttcatgtttggcatggatctgctcaagtttctctgcctgctgatttcgaagtacatcggaactggatcgaagctgatgtgaaaaccgctgcttgatacggttagcttcagcctgttgctgttaagccaaacgttccacgatatgtcgaagataagctgctcaaagtgattgtacacagtgcaagactcgtatcgaagaactgtgtctttgataaatagctcctcattcagagtttgtgctgcgtacgataagagtgcttgatgcgaaggtgttgttcccccctcgacttggcgacgggaaagggcatcaatacctttacaacaccgacgaagttctgcttgtgataccgtgtaagtgtactttggaaagcttcgaccagatatctcgacagctagcacttcagaagcctcctgctggaatttgtccaggtcgtaaatgggttccacacgaacatcgtgtggtttcaaacagaggttggtattctggcaaaatgcctgatcccgcatttggtagtcgcgtactgggactctttcgtgatgctgacagcttttaaaaaagtacaagacaaaccgagtttgaaaccctggttcctgtagcttttgcagtcgtgcctccagctcgtgcgagtgtctggtttcgccgaattctcgctaaaatgcggcggagagtccagcgacgtcgagtttggggtggaagcaatgcagcttaacgagaaaacatcttcagatactgttatgaagtccaccgcgctaaataattttttagcgttgctatcgccactttctgtgtcgtagaaaatatctacccgtgagtggctctttctcaagacttttgtttagaagcacgaggtaaatctcaattggaacactttagcgcgttgaactctataggacaaactcggttatacgcccagggcttgcacccgacgagcgggcattgccttcgtcgtgtcgagcttagatccggttctggatctccttggcaccgtgcagcagaccctcggccacgtacagacaacgacggataaatacggcaacgcaaaacccggcacacatatgttgtactttttacaataagtaattcagatagccaatcagcttcgagagttacacttgacatttgtatttcatatggttttaagtactttctctaaatttgtgtgtactttatgctccgttacgtgtattttatgtcattgccttgtacaatctctatcgttcccgaccgagaattctggcacatttactatggaggatgtcattcagttatgccggatttatccgtcgttgtctgtagtccggctcggtgaggaagggcgagcgggagcccttggaggcccaggtgatggcgttcgggctgaaggccttggccatctccttctggatgaaagggagcagggctcggtcgtcctcgcagaagtagtacatgcagtcgatgtcctcccacggctggtaggtggcttcgtcgcggaagacctgggcggtctggtgcttcagcttggcgatggcgcccttggtcaggtcctcgggcacgtcgtggtagaagatctcctcgggggtgagggggtagacgcgctcgccctggttggggtttatttagtcagtaagcttacatgcacggaaccattggcgtcgcagcgtaggggggaactcacctgcacgtccatccacggcagcgggttgccaccgatcatcttgaggacgctctggccctttgggagcacgaaggcggcgaggtagaccagaagaacgatgccgccctccttgccgtcggctttgcgctgcttgtagccaaggcccttggaggcctcgctaatgacgaagcctccgtacgagtggccgaccaggatgacctggcggccctcgtttacgaggggctccaccacggcgcgaacgggccgttcggcggcatcgtcgaaaccgcccttggttgggggctcagcaccgacggacgggtacgtcacggtgcgcgtctcgcggcccaaagcgttcagcttctccagcacgagctggaagcattcgggtccatgccaggcgccaggggcgaggacgaaaacgggttcggtgctgccagtcattgtcttttgaataatgatgggctacatggagaaaggctcctcgtcctaataatggtgggctgcggtggcgggctgcgtacgtggagaaagactccattgaccaagcctgtccgtctgcacagcacgtacagtacagaattctgcccgaataaggaacgggtgtataactaatagcctcacatatttaatattattttccagtcgatgtggcgatagggggatgtgcaaggtactgcaaggtactaaggtgaaaaatccagtgccaatcatccaccctcgtttgaaaaatggcgcgcatttagcgatcttactagacttcaaactacatgtatggtagtggtagacccgcactttttcttttgcacctcgccccacaagcccacctcctcccccactccacccatgaagtccacaccgtccaagcgtctccgcctcacttggtctgagaaagtgggcatcctcgacaaggtgaagggctagataatccctacgaggtcgaccagttgacagcgctgttgtggtgcgaggatgcctggtcaaaggttagtgcttcgaccatacgccactgttggaatcattccggactcgtaggtaaagctgctcttcagttcctttgaaattactaaatcagtacattggaaaagtatactcaacttaacatcaatttatatattctgcgtctttatagatatcaggcgttccttactcgggcagattactgtacatacagtaccgccaaccggtacggtagaggaagagcagccttctggtaccgagcaacgcattgattagtacaattgttgtaaaagccggtgcatattgacacgagaaagagccaaatcgacgcaccgagttccaaggtaacgttaacaacttttatctccggcaatttcttagtgccggacgcgtgtagaccctcaaaagaaagtccgacgtctagcgggctcgctgtagttctcgtcgctgccagaaatcttcttgtgctaacaagttgagctgttcgctctgagatgccggcccgggatttgcaggaaccattaaaccttacgtacagaacgaaattgacgcatgcgctccgctcctttttgatcgaacactgtatctcagtcatttctcagggatatttttgtgatttgaaacacttgaaaaaggagagttagcttatttcgcgtcgaatgcaacaatccgcggtccaatcgtgagcctagaagaaaagttatgtgatgtcaaaaaattacattgcaatcttttcaacagaggaggtataccataatacattttcactcagtggtgcggcatgccgccgcactatcactctactattgcaattgtccacgcaacgatgtccgctgtgcacacggcgcgtgccttgctaatgattgcaggctcattgtggcagcgatcgttatgctttaccccgtgttgtatcaaaataacttcaacaaaggtctatcgatgcgaggcgacttctagcatccggatttttgcttcacaaaacgacgaaaccggctcttctgcagtcatgtggcctttagcagaactgtgtgtgaaagaggtgttcgccaagtgctcatgcgagaccctcttttgttcaaatataacatgaaagaagactaatctctagaccgagatacttttcatagctcgcagtatgaacgcacctttaagcaagtccgctgacgaggggtatggtgccgcctaagttgttgagcagtagtttagtactaacaccatgtttttagcgttggtaagttacttaaaaatatgtcgaactcgcacagtttgatctctccaagttggtggactcgcacaattcaatttaaaccatttgaacttcaaatggtgggtttcaatcaggtgagggtaggactaataccagctgtgataggacctaccccgtatttgagctctcctgaaattgtagtgtttttgctctttttagtctctttcgtgcaaaatatggtcatattttgtgtgcatgttttgtaggtacagaatcccctcagtagtcatatccgcctttattcctagacgagggtattactgtcgtagggtgtaccgtagcggtggtacatattgtattgtaccacatatatagtacagactgtcttttggttgcacacctcgaaaaacgcagctcaaatcgataagcgggcatgaatttcatgcagataacgatctatagagatagaagagaaaacgccaaacaggataaaggctattgattttataccgtaagagatgttgagcacgatgtaggtaatgatactgagaacaaaatggttcggcatgatactgttcagccctatctcattattgttgacaagctcccaaaatcatttgtattcgaacgaacgacactacaggtagcaggtctgaaagccggcttctagagctaatgcaatcattaaattgaaattagtcgatgaaacacagacaataggagctggtgtcatggttagacttctccagccaatctgtacaaagtgtacttttcccaaagttaagcacccagaacattcatattccgtgattttctattccttattacgattgagacgtgatggggaataattacttgactttgtactgggaacgttagtgctgctatcgcagaccaaataggattatatccgtggtacgtcaagtcaaacaattaccctcttgacatctagctggtatattttcttgaaaccggtacgactccggggccctctaaagggtttatatgcgtgagcagacggaaccggtaggatgcctatcacaccggtatggccccggtgatgcactgggccctccaaaaggtttatatgcgtgggcagatccaaccggtgtgcaaccgacgacactggtatgattcagtatatatattcgagcagtgaacgaattgaagtaaagactggttacccgggccccgggtcaagcccgtgggtcccgggggggagggtcgcagttcgtaagaaaggttaattgtggtgtattagttgcgtctatcctagctgtggtgttttgagtgctagccgcagtaagcgactatatgtacgcatcctacaagacagaactcactaggcacgagcttaagtaaggttaattgtattaatactttttcaaaacttaaaattatcgttagctcacaaagctacattgaagactgtgaagacgtaagcactttctaaaaccctgttcgagtgaaatacgatcaaaggccttgatcatcaagacgcgaatctaaaacaaaaaatgaccgttgcaagttccccgtgcataaacttttaagctctacttgtcgctaagcacacccaggaggaatacttctgaagtattccacctgggtgtttcgtcagcccttcgctgggtaaaaatgctagtggcaataatgcatgacagaaattaaactcgaccaggtgcagatatgttaccgaccggataaaccggaacttccagcttatctgtcaatatgcgatagcacttgtccatctctcggttatggcgcgtagacatacatcagtcttgcgttatcgattgtacctcatgttgaatttatctgaggcactggtcgcacacttttgattagaacgtttgtgggagtatggttccctcacagtaggcttatcaggtcatcgtgtcgagactggacgccacaatagcgctccggcatgtttcgacttaataggttaggcggcttagcggaaacaaacaccccaacagattgtcttgctgtaacagggaggagatgtacatgctctagggttcaactctagatagagtccttagatttttccgatggcctcgcggtccagatacaattttaggttggtttcaccagttttgtaggtcgtattaataggctagcgagctcgagtatgccgatcagtgttctgctgccaacgaacgcttcatctcggtctgtagttggatgaattcgttcgaaagacttcgccgtcagttggacagtcttcgttctggcttaagacttccatctagtgcgcctaagcgcatatacagtgatccgggttttgatattgataataaaaaatgtcttgaagacatgacgtgagggtgtaacacgttgtcttcacaaaatccccgagctacggctttacaaatataatatccgcacttgctctaaccttttcgttggccttctcagccgccgccgcggccttggcaagtgcgttttcgtattcttgtctgtatgcggtcctcatcctcttgctcagcgcaggaacttccttgcgcagttgggacggttctttaccggccttaatccagagtttgaactggtcaaattggagcttataccccagcttcctcaccgctttattgtcgctggctcttgcagcagacagcagcttcaccacttcgtcgtctccgcgctgactgacgaggaacttggttatcgtcatggcgtcttttttgctgcttgcatgtctgttggtgtcggccatgtgcccgatccactggttcaacttcgggctggtaacgaagtcgtccaccttgtccaccttggcaatcttgtccaggtccaggtgcgtcaacgctttctctaagctcatcccctttagcacatcgtcgaccttgtcgtccacggcagagaccttctgaacgaccagcggtgcgaccttagacgtcgcgattttagacgagactttcgtcgtggtgtccgagccgaagagttttttcagtccccccaagctaagtctctccactttgcgtcgggcctgcagtctgtccagtttgcggaatgggcgaaggcaaagatgacggtcaaatccgtcaaaggctatgctgaagaacaacccaggcaaggccctataccgtaagcgggacgcacaacttgtgaacgcgtacacagaccaccttaactcgttgaaggcggccgcatgagcttggttgcagctccgacggaagatgtagactgctcaaattcacccttttggctctaaagatcaaacaagtgtgaatattagtattctcgcatgcgtaaagtccgtttgatctaaagcccttgtgcaaatgcatttaggtactgaggtcaaaatgcattgatctgtgagctaaacttaagatctccatagatcacttcggtatcggtttagtgtcttgagaacgctttagccttacgcataagaatccggatttgcctgcatacgaactgaaaacgaaacacgcgtctggtgtatctgggggtattctgacgcagaacacctcccaaattttctgagtcaatacttaagtaatgagtttttcattgtcaacaaggctgtttgtgtacttggttcgtgttaacaacgtaagggggtgcaagtgcattttcagtatcgataggtgacgcattaccttatcattgctgccagctacagtagggtaattcagtgagctgggattgtaccacgatgaccttctgagcaagccgacgcactgccagtaaaccaagcgctctctgcacgatataggtctcattttcttgtctgcgctacagttgtagtttatttacgattacaggtgctcagaggcctttcgtgaagtgccaactcctcagcactgacacatggaattcccgttggaagcacaataatacccaaaggcgaacaacatgcaaatcgattaggatgcatgacagcaaacacgtaataaacatcacaaccaactagtgttgtttcttaccaagttaataactcttaataactggtattagtaattttaggcattggtattacctttgtgtatcatttgtgtatcgtaatagttaaatattgtcttaagcattttaacttctggaagagcaagcttttgctcatatcagcttcccatacaatgctagcctgcacgcgcgcggtgcgttctccggtcccaggctggaatctctcccctagatctacgcgtcgctcggcaccagctcgttgctcggccaggacgtgaacggcgccggcgccacgctggccacgaggctcgcaaaaataggcccaaggtgctctacgacgcgtacatcgccccacattcaagctgatcagcaacggttccgcaacgcagtagtcaaacgcccgctggatgtcatcaaggaagccatcgtgtacctgcacttctgcttttcggcccgagacgatggactgcgacaaggccactcagactgcttacagaagatctcttcacgcgccatgctagtggacatgacggagaccgaaaccatgacgctcggcctggccctcgcggaccccatgtatacgtcggcgggcgacctggaggtcgacggctcgttcaccaaggacctgcgcttcttcagtggccagaagtcagccatgcacgcgcatcgtgccgccggtgtgggcgtctacatcatcggcgcgtcacccgagttgtacaccgttgcggccggcagttgcttcggactaggcgacatggtgcccaaggagaacaggtgcggcgtgcgcttcacgacggacgaggccgatgcttcactgctgagcgacaggacctgcgagttctttggcactacggagtccggcaccaacaacacctatctcctgcagggcgggcctagccatcagtacgtggaccacgtcacgtgcctgctggccgagggattcatcaaaaatgaagtaagtgccggtgggagagcgtgtagctggatatggtggatctcatgagtttgtgtgttgtgctgcagattcgtaagagagggaagggcttgaagagtatcatatacatcgccgaggtggccattatgctggtacatgaacgaacagctcgctgataagggttggacgaggcctaaatgttgcgctacaagcgttgatgttacaatattactgcattcttaaccaaatatgacgcttctttatttgtgggagtgctagtgcgcgttctgctgtgccaatgtgcgccgttgcgctggcagctcagtgacagaagttcaagttgaggtcatctcgtagaagggcaacctgtttcggcgggtacggcacgatgcactgaatatgtgagctaactgatgtgaagctctacgattatcagaagagcaagaagagctggcgtttgcattatttgaactcggattagtcagggcaaaagcggtttagccctccacctctccttcacccctagcaagttcgccaccactaaggtcaccaaagtgttctgcgaccgccatggccacgggtccacacgcagcttcaccacgcacaagcacagaaaggttgtgtgcgcgctgaaacagggtggtgaggccggcaagagcaaatcgaatatcctcggctgcgtgcatgagtgatcaaggctcgagtagcgcgacgacgaatatgccgtcacgtccgacaagcaccatcaagtctacccctatcatgaacaactacccaagtccgcagcagaaccaaaactcatcacgagaaaatgaagcggaggaagctgctagaaataccatcagccgaggcaacatctagaagaaattcgaaagaggttgaagccaatgcattgatacacatttgcatgaggacgacgactctattgactaactagtgcatgatatgtaatcaagaaggcgtgaacggaatgaaaatatggatcgtgttgcgggcttagctagcgtgaacaaagtcaaatatgctaatgctcccaggttggaccaaacagcaccctcggcgagtggtgggtgcgtccagtgctcgactgtggagttggaggtagtccacgacggccgctgctaccccctgaaaatacgagacgatcgctagttggtagaatcggtgttgttgcacttgccgatccgggcggcctcacgaccggtggcacaagctggcgctcatcagcacgcgtgaaaacggttccgctgcttgttgactgcgtaagtgcgactgactgcgtaggagcgaccgactgcgtaagagcgaccgactgcgtaagagcgaccgcagcctcgtcactgcatactgtgctggtattcgtcgcttggtcgggtagcgggttggctagtgcaggcgaaaatagtgttcttcgagctagcgggggtgggacagcttcacgttggtcggtctgcgagggcgtgaagaatcgtgatcggtgcgccgtattagaccgactaccgcgcatgcgactggagctgttgggagcaattggcgtaaggatgtcatcatcgctgtagtcgtcactcgcgctgctttcgccctcttcttctgcattgacttgatagtgcactgcactagttgcagccttgtcacccgcattcgagtacaaatatggtagcttttccacgcgatcgggtttcagccgatttcgtcgcatggtgcggatgaaggtccacgagcgctcactcgcagcggacgacgtcgagatgctcaaaacgcgggtagccaaagcatgtaggagcggaaacttgttaaccttgaccagccaccagtctaatggcgtgtccctcgcgttttttttgtggtcttcggctgtccaggacttcttcacgtgaataaaagccatgacagctcggtgaaccgcatttggagatacgttggagggtagaccaactcgtgtagctagatctacgcatgcatcgactgcattgtccaaatcatcaccttcaaagtcgtccgtagacttagttgggtccagtaaaaatgcagcgatgattgattcgcgcttgagggtgttccagcgggagctaatctggcctcggatcgtgttaagaataccagaagcaacatcatcagtttcgcggttgtagatgacgtgggttttcagtccacgaaagtattcatacaccatcgaaaggcaacacccatccttttcgagagcgccgagagcttggattatcgggttcaccagtcgcattacggctctggcattcacccaaaacatgctatcagccaaaatggactcgacgcgattgagtttggcagcagcatctccgtaacgagccagaaattcatggttggaaaacaactcacgcagcacatcttcgttcctcacgacactggaaatacaatttgtgctcgagtaccaccgcgtcgaaacagggatgattagcgcgcgtcgtcgctgccgggtaccaaaatacttgcgttgcagagcccgaaagcgataaagaagcgctgtacgtttacgcacaaatttggtaactaggacggctttcttgaagacgtcactcatgaactccatcccgaacatgtctttgagtagaagattgatcgtgtgtgccgcgcagccgttacacgttagacttggtatcttggccattagaagctcccatgacttacgcctgttagacgcgttgtccgtcacaacagcgcataccgatccttttccgacgacattttcaacagcttgaatcaccttgttcaactctgacgccatgaactcccctgtatgctgtttgtcggcgcagcgctccgatgaccaaaatatgggtcggataaatggagacgtcaccataaagttgataatggactcgctgttgggatcggaccatccgttgcatacaatggcaacgtactgctgctccctcagcacctccataacgctggcaacttcctccgcgtacgcgctatcaagcagtgaggtcgccaaatcttggcgtgaagggagcgtcattccgggccggtacttcgtcaggatacacctcatggctccattttcgatgactcgaaacggaatgccgcaggcatagaacgctttggcaatctgaagatggaactcctacttttcagtcactgagaccggtcctagcacactcgtagccatttcaggccgcgaacgcttggatggactgtggggctgtcgggacgatctcgcttggagggtgttacagggtaattagcccggacgtccgctggacagctgcgaatgtgtgggcggaggtttttcttgggctgggcattcttgatgagcttggagcagtgcctgcacgtcacgtcgcggtgctgcttcttcgggttggcccaacgtggcacactcggtccacacgccaactgaagggcgaccaaggccagaccttcactgctagcccggtcctcgttgcggtggccgttttggtccatggagcttgcaggctctacaggagcaagtctgcgaatgcagcgacgagaataggccccgtgcgcgagctgcctgccacgtggagcatacgcagattcatgtcggtagacctccacgtacgttgacaacttcacgaaacgcgttgaccgaatatgtctgccacaccaactatacacatgaggtattaccgttagcagatcgaatatttcttccacaccaactatacataaaagttattaacgttaataaatggtaagtacgaaggtaataacggtaactggtaataactggataaggatttgaccaactctacaaccaacgagtacatacaaactcgtacatgtaaattgaaaatgcctcaaacagactgtattgacgcaagttgctctctcctgatcggacaagtacggttctgtacttgtccgatcaggagagagcaatacttacttgcatagaattaagccttttggttgagtctgtcacagtgggaggtaatgcagcatcctgcgtgatgatgtgccacctgtctactgcctcccttgctgtggttctttcggcaagtcgaactctcactctcaaactcgccctcccaccgatcaagctaccacgttttccacgcgcgttcactgcgctgctctactcgcagcttccatcgtcctggcaaacgcggacgtgtcctcggcagtggtggaaccccggcacttttcatcttcgctccgctcgcttgcggctgaccacaacgacccgttgaccaggagacggagatccaccaatgcaccagtcgacgacgatgaagagagaggaccgttcgcgttcatcgattatatgaacggcaagggcaagatcaacgccatgatgcaggcgccggagaaaggggacgacaacgtcttcgccaacccccaatgtaagaactgggcgaccaagaacaacgctgatgacgacgctatcggcgcactgactcgccgctttggcgcccctgaagtgacgacaatgctggctgcggcggcaaagaaccccaatacgaaagaagccgctgcggtgctacaggcgagacagatcaagggctggctgtcctacaacctggacccagacgacatctttaagctcatgaagctcgaccaggcgagcaacaacctctttgacaaccccacgctgactgcgtggaccaactacctggcggctttcaacaagaagaaccccaggaaggagaccacaagcctccaaggcttcaccaagagctacggggaggaaggattcctcaagatcctggcgtcagcagacgacagcgttgggacaacgaagtgtaaggaggagctggcaaagggctggctggatgagcctacgcacccggcaaacatcttcaagttcctgaagctggatgaggcgggagacgatctcctgaccaacccactactgagcacctgggccttgtacgttcaggagttcaacaagaagtatcctttcgcgaaggcgacgatgatccagacgttcagcaagagctacagcgaggagaaggtggcggtgatgattcaagcagccacgaagaatccggagacggagaaattcgccaaggatcggcagacggctcagttcaagcagtggatggtggacgagaagacccccgatgacgtcttcaagaaggtgctgatgctggactcgaccgacagcccgaatgctgacatttggcgctcatactacagcgcctacgacaaggaatacactggcaagctgttatcatttaaaccgtaggcaatagagatgttctgtagataggatggtcgtgtttgcgaaatcccatgatgttttttgtcttatttaaatccggtatacttcggcttcgaaacaactactacgtagtaggtcgtcctcgatcttagctgggaagaccagtgttgtaaagtgctggtgctggtactgatactaattgccgtgacaagggcaaacttcggctctcctgaagaacaggcccgctttttagaacgttctaaatctagaacaaaaaatgacttgaacttaatatgaggcccggatgctgtccttgttttgccctgataagctaattataaataataaaagaaagagaagcacaaacgtagtagctacaagatcgaaagtgcgaccgcaaagacactttatgaatgtagtatagctctcgatccataaggccaaactttttcaaatacatcgacagactatttttttagtaacccttgaagggactcaactttacatcgagctgttcaatgcgcaattaattgttgtagtcgagatgtagctaaatgattatcacaccaacaaccctgcagggcaactagatatatttatttccaaatgaaaaaagtcacaagcgacttgggcgcgtctcacttgcggcgcaccagtcgcacatctcctctcagcctactttaacgctctagcatatatcgagatagtcttgcgttcttcgggttcggtcacaagacgcgtttgcacaggattcgggttcgcagcgagtagattttgtctcagtcggacgcctttacacacgtgctggtagacccttccaactaaactttgtcctttcgagtcgtccttgagatcgtgatgcagagtcgtgacctattccagcaacgaacgcctcgatcatgtcctgactagcattaacccctccaaaccggatgctgcataatgcagcttagatttgaaagcttaaactgcatatatgcagcttaagccaattttgacttgaaatttgtatgactgtcctttcccccgacacaccactatacaaacgtcacgataaaattacgtttagtttctgttcgcgcctttttatttttccagatgtcaaagaccggcatttgtcaaaattcggaatataatgtttggcaagggcacgggacccactgcctgatttggacaaaatctgcgaggtatcggactgggtggctcacagcggcttccatttgccgcttttgcaaaatcgccctcattcgagaatttgcgcggccaggactcaagtcggcgggagaatcaacatgagtcacaggtattcgtgcgagacatcgacgctcgggtacgacgctaatggtacgttcatagcgagcgcatgctataccttattgctaacctgtttcatttggcacgttttgtcctgtagaaggataacaccctcctccgtgcggtgctcctctagcgcttggtaaggtttggtcagagatgtctacgagattcatgcttgctgacaagattttgcattactcttggtccagttgtgtttactgcttccaggcgagcgtctgctgctgtagctgtccaagctgtcgcactcagtcaaactgtcgagcttcggtcgagctgctcaacccgctgcatccgtgcctggcgttccgagcgcttgcggaagaactcctcggtatcccggtgctcaagtctacccgcattcacacctgttgtgactgcttcctcgcgtcgatgcaaacgacgactacgacgacgccaggacttgaagggaaatggcgtgctccgaacaatggtacgttgtatagcatactgtcctgtatactgcattgtatgcagtattacatatttatgctgcctcgtagcctacatgatctaacctgagcaatattggtgttgttgaaggagactacggtgaccaaacagccatgatcagcccgaaaacgagcccgcctgcgtgaagacgacggctcgaatgaaattgtagcgaaatagacgagctgagaagaactccggcgaagccagagatgccgctttgggatccattgatctgaccgacgggcgaacgagacgaaaactgacttggcctgcgctcgtaatgacaaggtcgagtggtagtaacgtgaaagtatgtaaactaatataagcaatttggagaaacacaattgcagtcgatgcggttcctagtgtgatgctatggatacccacacgcatagtcgtgggtgcaacgtggctctcccattagcgagatgtgctggtaatcgttgctttccggttgactgcatgtcattgacatcaatcaatctaagcaccagcaaattggagtacccaactgtagaactactagcttccctacaccaacactgcggtaaatcacatccaatcattatatatcatatgcatgaatgcagacgtagcacttgtttagtgtgtgtagttagttttgaaggatccatgcaacgaactacttcggtgttgaagtcagtcgaatttgatttggtgatctaacttggtgatctttgctgctgcttcaactacagaatgacatgctcctgtctgcaacaacacatcctaacttgcatcttaggtattgtcttacgtacgaaatggtaacgtttcacctgattgcccccctggatatgtttctgaatgtctatttcatttgatgtttgtatagtgcatagaatgcccccggacgtaccacaagcttacagaacgcctagaggtgacacacctactttgtatttatgtttttgtatgggaagttttaaattccgatttttaaaaaatcgggactccctagacactagtttctgttcggcaggcaccctgtcactatccgtggtaagtagcattattcagcatgggtatgtcacactagagccaatatgcagattatattcagtattagcatggccttgttagtgctcatcgtgcatcctatcttccctaaccatttttgtatacaaacatcaagtctaattacgctgcatatgcagtttacatgttcttttcggctcccggtctggaggggttaagatcagataatattagtgaagttgcgataccgcagcaattgtagacgaacacatggctcttgtgaagaacaggcccgctttttagaacgttaaagatctagaacacaaaactcacttgaacttactatactatatggcttaggtacgacttgtagtcccgagtatactctggtatacagatttggcccccagtcagacaacccttatgcgaaaacagcaatagcttttgagctgggaccgatcggtatgtatctagatgcacatcaacaacaaattaaagtgctctagaaggttgaatgacctctagtcattgtattgtgggcttgaccgtaaggcgtctcgaaagcgggcctgttttgaacgtttaatactttacataagtgattacgcttttggaggtccggcgacagccagtcaaaagcgggcctatcatgagcatttcagagggcaaaacgtggacagcatccgggccacatattaggttcaagtgagttttgtgttctagatttagaacgtcataaaaagcgggcctgttcttcaggagagccgaacacattcgtgctgcacgtatatgtggcctgagtgggccttttctagctactttcggcattgaatcaccccctagagcaccagcacgtccaacgcgtcgcattctacagtacaaccagggaaaaattaagtttaggccaagtttccatgtcacgagtaatgggggggggtacctgaagactcaagcggaggttgctgctccttcttgcccttatgcgagcatccagttcatgtccgttctcctgttcagcaaagtctaaaatgacattaagcgagccggagtaagttaaggtgttgcgcgaccatcgcggattggagatcaggaatctacactaggccacggaaagcgttggctcgaggacggaagcgttaacagcagaattgtacacaagacgaccagccaggacgctacaacaaggcagcaggagacgagcgaagcagttggagaccaagaagcagctggataaaacgaccaaggacgaagcgatgcgatcttgcaggtacgttgagccaagggacgaaacgtgcgccagccagcagcagacacagaagatcgcgccgcgaggccccccggtggccataagatcgcgccgtgaggcggcgtggagctcgtgcagaaggtcgcgcgccgaagatcgcattgagcgagtggcgccgagacgccgctgggagtggcagagcagccagttgaagatttaccaagttggtgacaagcgcgggcaagtcacctccagcagccagaagaagcctccgtcggtcgagacgttgaggcaggaggaagcgatcgtaaccaagaaatacattgattgacaagccaagtagccttacttctgttaccagcgcctgcgtcgcacgcccacaagtggttcaagtccacagctgagagtgacgggttcgagtccctggacgggttcaagtccccggctgacggcagtgggtcaagtcgacgggttcgagtccccggagagcaacaggttccagccccaaggcacgacagcaggatcaagcccttgagcgggttcgagtccctgcaggccagtacaccgggttcgagtctctgccaagcaacaacgggttcaagtccctccgtgggtccgagtccctgcagagcagcgacgggttcaagtccctcagtgggttcaagtccctgacgcagagctcgggttcaagtcctgactttggaggacgtgtggtgcgcctgggatatcgactggtgaactctgttggacgttgtgtgttactcgcgagaggagctggaggacctcacgtgcaatcggtggtcactgcggctttgatcgtggcttgtgtgtttacatttacggagttcgtcagaagttgccaccggagacctcggaagcggccgcgacaaggtccgggcaaggcagcagggcgcgggtaacaggaggagtgctttcttggtggtcatacaggggcgaatcaacacggttggctttcgtgtgagtttgccttcacgagacttcgcttcagcgggcacgnnnnnnnnnnnnnnnnnnnnnnnnnnnnnnnnnnnnnnnnnnnnnnnnnnnnnnnnnnnnnnnnnnnnnnnnnnnnnnnnnnnnnnnnnnnnnnnnnnnnnnnnnnnnnnnnnnnnnnnnnnnnnnnnnnnnnnnnnnnnnnnnnnnnnnnnnnnnnnnnnnnnnnnnnnnnnnnnnnnnnnnnnnnnnnnnnnnnnnnnnnnnnnnnnnnnnnnnnnnnnnnnnnnnnnnnnnnnnnnnnnnnnnnnnnnnnnnnnnnnnnnnnnnnnnnnnnnnnnnnnnnnnnnnnnnnnnnnnnnnnnnnnnnnnnnnnnnnnnnnnnnnnnnnnnnnnnnnnnnnnnnnnnnnnnnnnnnnnnnnnnnnnnnnnnnnnnnnnnnnnnnnnnnnnnnnnnnnnnnnnnnnnnnnnnnnnnnnnnnnnnnnnnnnnnnnnnnnnnnnnnnnnnnnnnnnnnnnnnnnnnnnnnnnnnnnnnnnnnnnnnnnnnnnnnnnnnnnnnnnnnnnnnnnnnnnnnnnnnnnnnnnnnnnnnnnnnnnnnnnnnnnnnnnnnnnnnnnnnnnnnnnnnnnnnnnnnnnnnnnnnnnnnnnnnagtcgacgggttcgagtccccggagagcaacaggttccagccccaaggcacgacagcaggatcaagcccttgagcgggtccgagtccctgcaggccagtacaccgggttcgagtctctgccaagcaacaacgggttcaagtccctcagtgggttcaagtccctgacgcagagctcgggttcaagtcctgactttggaggacgtgtggtgcgcctgggatatcgactggtgaactctgttggacgttgtgtgttactcgcgagaggagctggaggacctcacgtgcaatcggtggtcactgcggctttgatcgtggcttgtgtgtttacatttacggagttcgtcagaagttgccaccggagacctcggaagcggccgcgacaaggtccgggcaaggcagcagggcgcgggtaacaggaggagtgctttcttggtggtcatacaggggcgaatcaacacggttggctttcgtgtgagtttgccttcacgagacttcgcttcagcgggcacgatcggagccgcagcagcgagactttattttgagcagtgctgagaggtgggatgacacgccagtctgcgcgcacgagcgcgccagcgagtccaggtgttacgacacgaagttctgggacgcctgtgacggacgccgcgctgcccgaacgtaagcgacgccgcgttgaagagcacacccgagtcgtagttgatgatggtcaaggcggagaagaagatgttgaagtaagcacttcggtgattacagcggatgagggttaccagcgcctgcgtcgcacgcccacaagtggttcaagtccacagctgagagtgacgggttcgagtccctggacgggttcaagtccccggctgacggcagtgggtcaactcgacgggttcgagtccccggagagcaacaggttccagccccaaggcacgacagcaggatcaagcccttgagcgggtccgagtccctgcaggccagtacaccgggttcgagtctctgccaagcaacaacgggttcaagtccctcagtgggttcaagtccctgacgcagagctcgggttcaagtcctgactttggaggacgtgtggtgcgcctgggatatcgactggtgaactctgttggacgttgtgtgttactcgcgagaggagctggaggacctcacgtgcaatcggtggtcactgcggctttgatcgtggcttgtgtgtttacatttacggagttcgtcagaagttgccaccggagacctcggaagcggccgcgacaaggtccgggcaaggcagcagggcgcgggtaacaggaggagtgctttcttggtggtcatacaggggcgaatcaacacggttggctttcgtgtgagtttgccttcacgagacttcgcttcagcgggcacgatcggagccgcagcagcgagactttattttgagcagtgctgagaggtgggatgacacgccagtctgcgcgcacgagcgcgccagcgagtccaggtgttacgacacgaagttctgggacgcctgtgacggacgccgcgctgcccgaacgtaagcgacgccgcgttgaagagcacacccgagtcgtagttgatgatggtcaaggcggagaagaagatgttgaagtaagcacttcggtgattacagcggatgagggttaccagcgcctgcgtcgcacgcccacaagtggttcaagtccacagctgagagtgacgggttcgagtccctggacgggttcaagtccccggctgacggcagtgggtcaactcgacgggttcgagtccccggagagcaacaggttccagccccaaggcacgacagcaggatcaagcccttgagcgggttcgagtccctgcaggccagtacaccgggttcgagtctctgccaagcaacaacgggttcaagtccctccgtgggtccgagtctctgccaagcaacaacgggttcaagtccctccgtgggtccgagtccctgcagagcagcgacgggttcaagtccctcagtgggttcaagtccctgacgcagagctcgggttcaagtcctgactttggaggacgtgtggtgcgcctgggatatcgactggtgaactctgttggacgttgtgtattactcgcgagaggagctggaggacctcacgtgcaatcggtggtcactgcggctttgatcgtggcttgtgtgtttacatttacggagttcgtcagaagttgccaccggagacctcggaagcggccgcgacaaggtccgggcaaggcagcagggcgcgggtaacaggaggagtgctttcttggtggtcatacaggggcgaatcaacacggttggctttcgtgtgagtttgccttcacgagacttcgcttcagcgggcacgatcggagccgcagcagcgagactttattttgagcagtgctgagaggtgggatgacacgccagtctgcgcgcacgagcgcgccagcgagtccaggtgttacgacacgaagttctgggacgcctgtgacggacgccgcgctgcccgaacgtaagcgacgccgcgttgaagagcacacccgagtcgtagttgatgatggtcaaggcggagaagaagatgttgaagtaagcacttcggtgattacagcggatgagggttaccagcgcctgcgtcgcacgcccacaagtggttcaagtccacagctgagagtgacgggttcgagtccctggacgggttcaagtccccggctgacggcagtgggtcaactcgacgggttcgagtccccggagagcaacaggttccagccccaaggcacgacagcaggatcaagcccttgagcgggtccgagtccctgcaggccagtacaccgggttcgagtctctgccaagcaacaacgggttcaagtccctccgtgggtccgagtccctgcagagcagcgacgggttcaagtccctcagtgggttcaagtccctgacgcagagctcgggttcaagtcctgactttggaggacgtgtggtgcgcctgggatatcgactggtgaactctgttggacgttgtgtattactcgcgagaggagctggaggacctcacgtgcaatcggtggtcactgcggctttgatcgtggcttgtgtgtttacatttacggagttcgtcagaagttgccaccggagacctcggaagcggccgcgacaaggtccgggcaaggcagcagggcgcgggtaacaggaggagtgctttcttggtggtcatacaggggcgaatcaacacggttggctttcgtgtgagtttgccttcacgagacttcgcttcagcgggcacgatcggagccgcagcagcgagactttattttgagcagtgctgagaggtgggatgacacgccagtctgcgcgcacgagcgcgccagcgagtccaggtgttacgacacgaagttctgggacgcctgtgacggacgccgcgctgcccgaacgtaagcgacgccgcgttgaagagcacacccgagtcgtagttgatgatggtcaaggcggagaagaagatgttgaagtaagcacttcggtgattacagcggatgagggttaccagcgcctgcgtcgcacgcccacaagtggttcaagtccacagctgagagtgacgggttcgagtccctggacgggttcaagtccccggctgacggcagtgggtcaagtcgacgggttcgagtccccggagagcaacaggttccagccccaaggcacgacagcaggatcaagcccttgagcgggtccgagtccctgcaggccagtacaccgggttcgagtctctgccaagcaacaacgggttcaagtccctcagtgggttcaagtccctgacgcagagctcgggttcaagtcctgactttggaggacgtgtggtgcgcctgggatatcgactggtgaactctgttggacgttgtgtgttactcgcgagaggagctggaggacctcacgtgcaatcggtggtcactgcggctttgatcgtggcttgtgtgtttacatttacggagttcgtcagaagttgccaccggagacctcggaagcggccgcgacaaggtccgggcaaggcagcagggcgcgggtaacaggaggagtgctttcttggtggtcatacaggggcgaatcaacacggttggctttcgtgtgagtttgccttcacgagacttcgcttcagcgggcacgatcggagccgcagcagcgagactttattttgagcagtgctgagaggtgggatgacacgccagtctgcgcgcacgagcgcgccagcgagtccaggtgttacgacacgaagttctgggacgcctgtgacggacgccgcgctgcccgaacgtaagcgacgccgcgttgaagagcacacccgagtcgtagttgatgatggtcaaggcggagaagaagatgttgaagtaagcacttcggtgattacagcggatgagggttaccagcgcctgcgtcgcacgcccacaagtggttcaagtccacagctgagagtgacgggttcgagtccctggacgggttcaagtccccggctgacggcagtgggtcaagtcgacgggttcgagtccccggagagcaacagggtccagccccaaggcacgacagcaggatcaagcccttgagcgggttcgagtccctgcaggccagtacaccgggttcgagtctctgccaagcaacaacgggttcaagtccctccgtgggtccgagtctctgccaagcaacaacgggttcaagtccctccgtgggtccgagtccctgcagagcagcgacgggttcaagtccctcagtgggttcaagtccctgacgcagagctcgggttcaagtcctgactttggaggacgtgtggtccgcctgggatatcgactggtgaactctgttggacgttgtgtgttactcgcgagaggagctggaggacctcacgtgcaatcggtggtcactgcggctttgatcgtggcttgtgtgtttacatttacggagttcgtcagaagttgccaccggagacctcggaagcggccgcgacaaggtccgggcaaggcagcagggcgcgggtaacaggaggagtgctttcttggtggtcatacaggggcgaatcaacacggttggctttcgtgtgagtttgccttcacgagacttcgcttcagcgggcacgatcggagccgcagcagcgagactttattttgagcagtgctgagaggtgggatgacacgccagtctgcgcgcacgagcgcgccagcgagtccaggtgttacgacacgaagttctgggacgcctgtgacggacgccgcgctgcccgaacgtaagcgacgccgcgttgaagagcacacccgagtcgtagttgatgatggtcaaggcggagaagaagatgttgaagtaagcacttcggtgattacagcggatgagggttaccagcgcctgcgtcgcacgcccacaagtggttcaagtccacagctgagagtgacgggttcgagtccctggacgggttcaagtccccggctgacggcagtgggtcaactcgacgggttcgagtccccggagagcaacaggttccagccccaaggcacgacagcaggatcaagcccttgagcgggtccgagtccctgcaggccagtacaccgggttcgagtctctgccaagcaacaacgggttcaagtccctccgtgggtccgagtccctgcagagcagcgacgggttcaagtccctcagtgggttcaagtccctgacgcagagctcgggttcaagtcctgactttggaggacgtgtggtgcgcctgggatatcgactggtgaactctgttggacgttgtgtgttactcgcgagaggagctggaggacctcacgtgcaatcggtggtcactgcggctttgatcgtggcttgtgtgtttacatttacggagttcgtcagaagttgccaccggagacctcggaagcggccgcgacaaggtccgggcaaggcagcagggcgcgggtaacaggaggagtgctttcttggtggtcatacaggggcgaatcaacacggttggctttcgtgtgagtttgccttcacgagacttcgcttcagcgggcacgatcggagccgcagcagcgagactttattttgagcagtgctgagaggtgggatgacacgccagtctgcgcgcacgagcgcgccagcgagtccaggtgttacgacacgaagttctgggacgcctgtgacggacgccgcgctgcccgaacgtaagcgacgccgcgttgaagagcacacccgagtcgtagttgatgatggtcaaggcggagaagaagatgttgaagtaagcacttcggtgattacagcggatgagggttaccagcgcctgcgtcgcacgcccacaagtggttcaagtccacagctgagagtgacgggttcgagtccctggacgggttcaagtccccggctgacggcagtgggtcaagtcgacgggttcgagtccccggagagcaacaggttccagccccaaggcacgacagcaggatcaagcccttgagcgggttcgagtccctgcaggccagtacaccgggttcgagtctctgccaagcaacaacgggttcaagtccctccgtgggtccgagtccctgcagagcagcgacgggttcaagtccctcagtgggttcaagtccctgacgcagagctcgggttcaagtcctgactttggaggacgtgtggtgcgcctgggatatcgactggtgaactctgttggacgttgtgtattactcgcgagaggagctggaggacctcacgtgcaatcggtggtcactgcggctttgatcgtggcttgtgtgtttacatttacggagttcgtcagaagttgccaccggagacctcggaagcggccgcgacaaggtccgggcaaggcagcagggcgcgggtaacaggaggagtgctttcttggtggtcatacaggggcgaatcaacacggttggctttcgtgtgagtttgccttcacgagacttcgcttcagcgggcacgatcggagccgcagcagcgagactttattttgagcagtgctgagaggtgggatgacacgccagtctgcgcgcacgagcgcgccagcgagtccaggtgttacgacacgaagttctgggacgcctgtgacggacgccgcgctgcccgaacgtaagcgacgccgcgttgaagagcacacccgagtcgtagttgatgatggtcaaggcggagaagaagatgttgaagtaagcacttcggtgattacagcggatgagggttaccagcgcctgcgtcgcacgcccacaagtggttcaagtccacagctgagagtgacgggttcgagtccctggacgggttcaagtccccggctgacggcagtgggtcaagccgacgggttcgagtccccggagagcaacaggttccagccccaaggcacgacagcaggatcaagcccttgagcgggtccgagtccctgcaggccagtacaccgggttcgagtctctgccaagcaacaacgggttcaagtccctcagtgggttcaagtccctgacgcagagctcgggttcaagtcctgactttggaggacgtgtggtgcgcctgggatatcgactggtgaactctgttggacgttgtgtgttactcgcgagaggagctggaggacctcacgtgcaatcggtggtcactgcggctttgatcgtggcttgtgtgtttacatttacggagttcgtcagaagttgccaccggagacctcggaagcggccgcgacaaggtccgggcaaggcagcagggcgcgggtaacaggaggagtgctttcttggtggtcatacaggggcgaatcaacacggttggctttcgtgtgagtttgccttcacgagacttcgcttcagcgggcacgatcggagccgcagcagcgagactttattttgagcagtgctgagaggtgggatgacacgccagtctgcgcgcacgagcgcgccagcgagtccaggtgttacgacacgaagttctgggacgcctgtgacggacgccgcgctgcccgaacgtaagcgacgccgcgttgaagagcacacccgagtcgtagttgatgatggtcaaggcggagaagaagatgttgaagtaagcacttcggtgattacagcggatgagggttaccagcgcctgcgtcgcacgcccacaagtggttcaagtccacagctgagagtgacgggttcgagtccctggacgggttcaagtccccggctgacggcagtgggtcaactcgacgggttcgagtccccggagagcaacaggttccagccccaaggcacgacagcaggatcaagcccttgagcgggtccgagtccctgcaggccagtacaccgggttcgagtctctgccaagcaacaacgggttcaagtccctcagtgggttcaagtccctgacgcagagctcgggttcaagtcctgactttggaggacgtgtggtgcgcctgggatatcgactggtgaactctgttggacgttgtgtattactcgcgagaggagctggaggacctcacgtgcaatcggtggtcactgcggctttgatcgtggcttgtgtgtttacatttacggagttcgtcagaagttgccaccggagacctcggaagcggccgcgacaaggtccgggcaaggcagcagggcgcgggtaacaggaggagtgctttcttggtggtcatacaggggcgaatcaacacggttggctttcgtgtgagtttgccttcacgagacttcgcttcagcgggcacgatcggagccgcagcagcgagactttattttgagcagtgctgagaggtgggatgacacgccagtctgcgcgcacgagcgcgccagcgagtccaggtgttacgacacgaagttctgggacgcctgtgacggacgccgcgctgcccgaacgtaagcgacgccgcgttgaagagcacacccgagtcgtagttgatgatggtcaaggcggagaagaagatgttgaagtaagcacttcggtgattacagcggatgagggttaccagcgcctgcgtcgcacgcccacaagtggttcaagtccacagctgagagtgacgggttcgagtccctggacgggttcaagtccccggctgacggcagtgggtcaactcgacgggttcgagtccccggagagcaacaggttccagccccaaggcacgacagcaggatcaagcccttgagcgggttcgagtccctgcaggccagtacaccgggttcgagtctctgccaagcaacaacgggttcaagtccctccgtgggtccgagtctctgccaagcaacaacgggttcaagtccctccgtgggttcaagtccctgacgcagagctcgggttcaagtcctgactttggaggacgtgtggtgcgcctgggatatcgactggtgaactctgttggacgttgtgtattactcgcgagaggagctggaggacctcacgtgcaatcggtggtcactgcggctttgatcgtggcttgtgtgtttacatttacggagttcgtcagaagttgccaccggagacctcggaagcggccgcgacaaggtccgggcaaggcagcagggcgcgggtaacaggaggagtgctttcttggtggtcatacaggggcgaatcaacacggttggctttcgtgtgagtttgccttcacgagacttcgcttcagcgggcacgatcggagccgcagcagcgagactttattttgagcagtgctgagaggtgggatgacacgccagtctgcgcgcacgagcgcgccagcgagtccaggtgttacgacacgaagttctgggacgcctgtgacggacgccgcgctgcccgaacgtaagcgacgccgcgttgaagagcacacccgagtcgtagttgatgatggtcaaggcggagaagaagatgttgaagtaagcacttcggtgattacagcggatgagggttaccagcgcctgcgtcgcacgcccacaagtggttcaagtccacagctgagagtgacgggttcgagtccctggacgggttcaagtccccggctgacggcagtgggtcaactcgacgggttcgagtccccggagagcaacaggttccagccccaaggcacgacagcaggatcaagcccttgagcgggttcgagtccctgcaggccagtacaccgggttcgagtctctgccaagcaacaacgggttcaagtccctccgtgggtccgagtccctgcagagcagcgacgggttcaagtccctcagtgggttcaagtccctgacgcagagctcgggttcaagtcctgactttggaggacgtgtggtgcgcctgggatatcgactggtgaactctgttggacgttgtgtgttactcgcgagaggagctggaggacctcacgtgcaatcggtggtcactgcggctttgatcgtggcttgtgtgtttacatttacggagttcgtcagaagttgccaccggagacctcggaagcggccgcgacaaggtccgggcaaggcagcagggcgcgggtaacaggaggagtgctttcttggtggtcatacaggggcgaatcaacacggttggctttcgtgtgagtttgccttcacgagacttcgcttcagcgggcacgatcggagccgcagcagcgagactttattttgagcagtgctgagaggtgggatgacacgccagtctgcgcgcacgagcgcgccagcgagtccaggtgttacgacacgaagttctgggacgcctgtgacggacgccgcgctgcccgaacgtaagcgacgccgcgttgaagagcacacccgagtcgtagttgatgatggtcaaggcggagaagaagatgttgaagtaagcacttcggtgattacagcggatgagggttaccagcgcctgcgtcgcacgcccacaagtggttcaagtccacagctgagagtgacgggttcgagtccctggacgggttcaagtccccggctgacggcagtgggtcaagtcgacgggttcgagtccccggagagcaacaggttccagccccaaggcacgacagcaggatcaagcccttgagcgggttcgagtccctgcaggccagtacaccgggttcgagtctctgccaagcaacaacgggttcaagtccctccgtgggtccgagtccctgcagagcagcgacgggttcaagtccctcagtgggttcaagtccctgacgcagagctcgggttcaagtcctgactttggaggacgtgtggtgcgcctgggatatcgactggtgaactctgttggacgttgtgtgttactcgcgagaggagctggaggacctcacgtgcaatcggtggtcactgcggctttgatcgtggcttgtgtgtttacatttacggagttcgtcagaagttgccaccggagacctcggaagcggccgcgacaaggtccgggcaaggcagcagggcgcgggtaacaggaggagtgctttcttggtggtcatacaggggcgaatcaacacggttggctttcgtgtgagtttgccttcacgagacttcgcttcagcgggcacgatcggagccgcagcagcgagactttattttgagcagtgctgagaggtgggatgacacgccagtctgcgcgcacgagcgcgccagcgagtccaggtgttacgacacgaagttctgggacgcctgtgacggacgccgcgctgcccgaacgtaagcgacgccgcgttgaagagcacacccgagtcgtagttgatgatggtcaaggcggagaagaagatgttgaagtaagcacttcggtgattacagcggatgagggttaccagcgcctgcgtcgcacgcccacaagtggttcaagtccacagctgagagtgacgggttcgagtccctggacgggttcaagtccccggctgacggcagtgggtcaagtcgacgggttcgagtccccggagagcaacaggttccagccccaaggcacgacagcaggatcaagcccttgagcgggttcgagtccctgcaggccagtacaccgggttcgagtctctgccaagcaacaacgggttcaagtccctccgtgggtccgagtccctgcagagcagcgacgggttcaagtccctcagtgggttcnnnnnnnnnnnnnnnnnnnnnnnnnnnnnnnnnnnnnnnnnnnnnnnnnnnnnnnnnnnnnnnnnnnnnnnnnnnnnnnnnnnnnnnnnnnnnnnnnnnnnnnnnnnnnnnnnnnnnnnnnnnnnnnnnnnnnnnnnnnnnnnnnnnnnnnnnnnnnnnnnnnnnnnnnnnnnnnnnnnnnnnnnnnnnnnnnnnnnnnnnnnnnnnnnnnnnnnnnnnnnnnnnnnnnnnnnnnnnnnnnnnnnnnnnnnnnnnnnnnnnnnnnnnnnnnnnnnnnnnnnnnnnnnnnnnnnnnnnnnnnnnnnnnnnnnnnnnnnnnnnnnnnnnnnnnnnnnnnnnnnnnnnnnnnnnnnnnnnnnnnnnnnnnnnnnnnnnnnnnnnnnnnnnnnnnnnnnnnnnnnnnnnnnnnnnnnnnnnnnnnnnnnnnnnnnnnnnnnnnnnnnnnnnnnnnnnnnnnnnnnnnnnnnnnnnnnnnnnnnnnnnnnnnnnnnnnnnnnnnnnnnnnnnnnnnnnnnnnnnnnnnnnnnnnnnnnnnnnnnnnnnnnnnnnnnnnnnnnnnnnnnnnnnnnnnnnnnnnnnnnnnnnnnnnnnnnnnnnnnnnnnnnnnnnnnnnnnnnnnnnnnnnnnnnnnnnnnnnnnnnnnnnnnnnnnnnnnnnnnnnnnnnnnnnnnnnnnnnnnnnnnnnnnnnnnnnnnnnnnnnnnnnnnnnnnnnnnnnnnnnnnnnnnnnnnnnnnnnnnnnnnnnnnnnnnnnnnnnnnnnnnnnnnnnnnnnnnnnnnnnnnnnnnnnnnnnnnnnnnnnnnnnnnnnnnnnnnnnnnnnnnnnnnnnnnnnnnnnnnnnnnnnnnnnnnnnnnnnnnnnnnnnnnnnnnnnnnnnnnnnnnnnnnnnnnnnnnnnnnnnnnnnnnnnnnnnnnnnnnnnnnnnnnnnnnnnnnnnnnnnnnnnnnnnnnnnnnnnnnnnnnnnnnnnnnnnnnnnnnnnnnnnnnnnnnnnnnnnnnnnnnnnnnnnnnnnnnnnnnnnnnnnnnnnnnnnnnnnnnnnnnnnnnnnnnnnnnnnnnnnnnnnnnnnnnnnnnnnnnnnnnnnnnnnnnnnnnnnnnnnnnnnnnnnnnnnnnnnnnnnnnnnnnnnnnnnnnnnnnnnnnnnnnnnnnnnnnnnnnnnnnnnnnnnnnnnnnnnnnnnnnnnnnnnnnnnnnnnnnnnnnnnnnnnnnnnnnnnnnnnnnnnnnnnnnnnnnnnnnnnnnnnnnnnnnnnnnnnnnnnnnnnnnnnnnnnnnnnnnnnnnnnnnnnnnnnnnnnnnnnnnnnnnnnnnnnnnnnnnnnnnnnnnnnnnnnnnnnnnnnnnnnnnnnnnnnnnnnnnnnnnnnnnnnnnnnnnnnnnnnnnnnnnnnnnnnnnnnnnnnnnnnnnnnnnnnnnnnnnnnnnnnnnnnnnnnnnnnnnnnnnnnnnnnnnnnnnnnnnnnnnnnnnnnnnnnnnnnnnnnnnnnnnnnnnnnnnnnnnnnnnnnnnnnnnnnnnnnnnnnnnnnnnnnnnnnnnnnnnnnnnnnnnnnnnnnnnnnnnnnnnnnnnnnnnnnnnnnnnnnnnnnnnnnnnnnnnnnnnnnnnnnnnnnnnnnnnnnnnnnnnnnnnnnnnnnnnnnnnnnnnnnnnnnnnnnnnnnnnnnnnnnnnnnnnnnnnnnnnnnnnnnnnnnnnnnnnnnnnnnnnnnnnnnnnnnnnnnnnnnnnnnnnnnnnnnnnnnnnnnnnnnnnnnnnnnnnnnnnnnnnnnnnnnnnnnnnnnnnnnnnnnnnnnnnnnnnnnnnnnnnnnnnnnnnnnnnnnnnnnnnnnnnnnnnnnnnnnnnnnnnnnnnnnnnnnnnnnnnnnnnnnnnnnnnnnnnnnnnnnnnnnnnnnnnnnnnnnnnnnnnnnnnnnnnnnnnnnnnnnnnnnnnnnnnnnnnnnnnnnnnnnnnnnnnnnnnnnnnnnnnnnnnnnnnnnnnnnnnnnnnnnnnnnnnnnnnnnnnnnnnnnnnnnnnnnnnnnnnnnnnnnnnnnnnnnnnnnnnnnnnnnnnnnnnnnnnnnnnnnnnnnnnnnnnnnnnnnnnnnnnnnnnnnnnnnnnnnnnnnnnnnnnnnnnnnnnnnnnnnnnnnnnnnnnnnnnnnnnnnnnnnnnnnnnnnnnnnnnnnnnnnnnnnnnnnnnnnnnnnnnnnnnnnnnnnnnnnnnnnnnnnnnnnnnnnnnnnnnnnnnnnnnnnnnnnnnnnnnnnnnnnnnnnnnnnnnnnnnnnnnnnnnnnnnnnnnnnnnnnnnnnnnnnnnnnnnnnnnnnnnnnnnnnnnnnnnnnnnnnnnnnnnnnnnnnnnnnnnnnnnnnnnnnnnnnnnnnnnnnnnnnnnnnnnnnnnnnnnnnnnnnnnnnnnnnnnnnnnnnnnnnnnnnnnnnnnnnnnnnnnnnnnnnnnnnnnnnnnnnnnnnnnnnnnnnnnnnnnnnnnnnnnnnnnnnnnnnnnnnnnnnnnnnnnnnnnnnnnnnnnnnnnnnnnnnnnnnnnnnnnnnnnnnnnnnnnnnnnnnnnnnnnnnnnnnnnnnnnnnnnnnnnnnnnnnnnnnnnnnnnnnnnnnnnnnnnnnnnnnnnnnnnnnnnnnnnnnnnnnnnnnnnnnnnnnnnnnnnnnnnnnnnnnnnnnnnnnnnnnnnnnnnnnnnnnnnnnnnnnnnnnnnnnnnnnnnnnnnnnnnnnnnnnnnnnnnnnnnnnnnnnnnnnnnnnnnnnnnnnnnnnnnnnnnnnnnnnnnnnnnnnnnnnnnnnnnnnnnnnnnnnnnnnnnnnnnnnnnnnnnnnnnnnnnnnnnnnnnnnnnnnnnnnnnnnnnnnnnnnnnnnnnnnnnnnnnnnnnnnnnnnnnnnnnnnnnnnnnnnnnnnnnnnnnnnnnnnnnnnnnnnnnnnnnnnnnnnnnnnnnnnnnnnnnnnnnnnnnnnnnnnnnnnnnnnnnnnnnnnnnnnnnnnnnnnnnnnnnnnnnnnnnnnnnnnnnnnnnnnnnnnnnnnnnnnnnnnnnnnnnnnnnnnnnnnnnnnnnnnnnnnnnnnnnnnnnnnnnnnnnnnnnnnnnnnnnnnnnnnnnnnnnnnnnnnnnnnnnnnnnnnnnnnnnnnnnnnnnnnnnnnnnnnnnnnnnnnnnnnnnnnnnnnnnnnnnnnnnnnnnnnnnnnnnnnnnnnnnnnnnnnnnnnnnnnnnnnnnnnnnnnnnnnnnnnnnnnnnnnnnnnnnnnnnnnnnnnnnnnnnnnnnnnnnnnnnnnnnnnnnnnnnnnnnnnnnnnnnnnnnnnnnnnnnnnnnnnnnnnnnnnnnnnnnnnnnnnnnnnnnnnnnnnnnnnnnnnnnnnnnnnnnnnnnnnnnnnnnnnnnnnnnnnnnnnnnnnnnnnnnnnnnnnnnnnnnnnnnnnnnnnnnnnnnnnnnnnnnnnnnnnnnnnnnnnnnnnnnnnnnnnnnnnnnnnnnnnnnnnnnnnnnnnnnnnnnnnnnnnnnnnnnnnnnnnnnnnnnnnnnnnnnnnnnnnnnnnnnnnnnnnnnnnnnnnnnnnnnnnnnnnnnnnnnnnnnnnnnnnnnnnnnnnnnnnnnnnnnnnnnnnnnnnnnnnnnnnnnnnnnnnnnnnnnnnnnnnnnnnnnnnnnnnnnnnnnnnnnnnnnnnnnnnnnnnnnnnnnnnnnnnnnnnnnnnnnnnnnnnnnnnnnnnnnnnnnnnnnnnnnnnnnnnnnnnnnnnnnnnnnnnnnnnnnnnnnnnnnnnnnnnnnnnnnnnnnnnnnnnnnnnnnnnnnnnnnnnnnnnnnnnnnnnnnnnnnnnnnnnnnnnnnnnnnnnnnnnnnnnnnnnnnnnnnnnnnnnnnnnnnnnnnnnnnnnnnnnnnnnnnnnnnnnnnnnnnnnnnnnnnnnnnnnnnnnnnnnnnnnnnnnnnnnnnnnnnnnnnnnnnnnnnnnnnnnnnnnnnnnnnnnnnnnnnnnnnnnnnnnnnnnnnnnnnnnnnnnnnnnnnnnnnnnnnnnnnnnnnnnnnnnnnnnnnnnnnnnnnnnnnnnnnnnnnnnnnnnnnnnnnnnnnnnnnnnnnnnnnnnnnnnnnnnnnnnnnnnnnnnnnnnnnnnnnnnnnnnnnnnnnnnnnnnnnnnnnnnnnnnnnnnnnnnnnnnnnnnnnnnnnnnnnnnnnnnnnnnnnnnnnnnnnnnnnnnnnnnnnnnnnnnnnnnnnnnnnnnnnnnnnnnnnnnnnnnnnnnnnnnnnnnnnnnnnnnnnnnnnnnnnnnnnnnnnnnnnnnnnnnnnnnnnnnnnnnnnnnnnnnnnnnnnnnnnnnnnnnnnnnnnnnnnnnnnnnnnnnnnnnnnnnnnnnnnnnnnnnnnnnnnnnnnnnnnnnnnnnnnnnnnnnnnnnnnnnnnnnnnnnnnnnnnnnnnnnnnnnnnnnnnnnnnnnnnnnnnnnnnnnnnnnnnnnnnnnnnnnnnnnnnnnnnnnnnnnnnnnnnnnnnnnnnnnnnnnnnnnnnnnnnnnnnnnnnnnnnnnnnnnnnnnnnnnnnnnnnnnnnnnnnnnnnnnnnnnnnnnnnnnnnnnnnnnnnnnnnnnnnnnnnnnnnnnnnnnnnnnnnnnnnnnnnnnnnnnnnnnnnnnnnnnnnnnnnnnnnnnnnnnnnnnnnnnnnnnnnnnnnnnnnnnnnnnnnnnnnnnnnnnnnnnnnnnnnnnnnnnnnnnnnnnnnnnnnnnnnnnnnnnnnnnnnnnnnnnnnnnnnnnnnnnnnnnnnnnnnnnnnnnnnnnnnnnnnnnnnnnnnnnnnnnnnnnnnnnnnnnnnnnnnnnnnnnnnnnnnnnnnnnnnnnnnnnnnnnnnnnnnnnnnnnnnnnnnnnnnnnnnnnnnnnnnnnnnnnnnnnnnnnnnnnnnnnnnnnnnnnnnnnnnnnnnnnnnnnnnnnnnnnnnnnnnnnnnnnnnnnnnnnnnnnnnnnnnnnnnnnnnnnnnnnnnnnnnnnnnnnnnnnnnnnnnnnnnnnnnnnnnnnnnnnnnnnnnnnnnnnnnnnnnnnnnnnnnnnnnnnnnnnnnnnnnnnnnnnnnnnnnnnnnnnnnnnnnnnnnnnnnnnnnnnnnnnnnnnnnnnnnnnnnnnnnnnnnnnnnnnnnnnnnnnnnnnnnnnnnnnnnnnnnnnnnnnnnnnnnnnnnnnnnnnnnnnnnnnnnnnnnnnnnnnnnnnnnnnnnnnnnnnnnnnnnnnnnnnnnnnnnnnnnnnnnnnnnnnnnnnnnnnnnnnnnnnnnnnnnnnnnnnnnnnnnnnnnnnnnnnnnnnnnnnnnnnnnnnnnnnnnnnnnnnnnnnnnnnnnnnnnnnnnnnnnnnnnnnnnnnnnnnnnnnnnnnnnnnnnnnnnnnnnnnnnnnnnnnnnnnnnnnnnnnnnnnnnnnnnnnnnnnnnnnnnnnnnnnnnnnnnnnnnnnnnnnnnnnnnnnnnnnnnnnnnnnnnnnnnnnnnnnnnnnnnnnnnnnnnnnnnnnnnnnnnnnnnnnnnnnnnnnnnnnnnnnnnnnnnnnnnnnnnnnnnnnnnnnnnnnnnnnnnnnnnnnnnnnnnnnnnnnnnnnnnnnnnnnnnnnnnnnnnnnnnnnnnnnnnnnnnnnnnnnnnnnnnnnnnnnnnnnnnnnnnnnnnnnnnnnnnnnnnnnnnnnnnnnnnnnnnnnnnnnnnnnnnnnnnnnnnnnnnnnnnnnnnnnnnnnnnnnnnnnnnnnnnnnnnnnnnnnnnnnnnnnnnnnnnnnnnnnnnnnnnnnnnnnnnnnnnnnnnnnnnnnnnnnnnnnnnnnnnnnnnnnnnnnnnnnnnnnnnnnnnnnnnnnnnnnnnnnnnnnnnnnnnnnnnnnnnnnnnnnnnnnnnnnnnnnnnnnnnnnnnnnnnnnnnnnnnnnnnnnnnnnnnnnnnnnnnnnnnnnnnnnnnnnnnnnnnnnnnnnnnnnnnnnnnnnnnnnnnnnnnnnnnnnnnnnnnnnnnnnnnnnnnnnnnnnnnnnnnnnnnnnnnnnnnnnnnnnnnnnnnnnnnnnnnnnnnnnnnnnnnnnnnnnnnnnnnnnnnnnnnnnnnnnnnnnnnnnnnnnnnnnnnnnnnnnnnnnnnnnnnnnnnnnnnnnnnnnnnnnnnnnnnnnnnnnnnnnnnnnnnnnnnnnnnnnnnnnnnnnnnnnnnnnnnnnnnnnnnnnnnnnnnnnnnnnnnnnnnnnnnnnnnnnnnnnnnnnnnnnnnnnnnnnnnnnnnnnnnnnnnnnnnnnnnnnnnnnnnnnnnnnnnnnnnnnnnnnnnnnnnnnnnnnnnnnnnnnnnnnnnnnnnnnnnnnnnnnnnnnnnnnnnnnnnnnnnnnnnnnnnnnnnnnnnnnnnnnnnnnnnnnnnnnnnnnnnnnnnnnnnnnnnnnnnnnnnnnnnnnnnnnnnnnnnnnnnnnnnnnnnnnnnnnnnnnnnnnnnnnnnnnnnnnnnnnnnnnnnnnnnnnnnnnnnnnnnnnnnnnnnnnnnnnnnnnnnnnnnnnnnnnnnnnnnnnnnnnnnnnnnnnnnnnnnnnnnnnnnnnnnnnnnnnnnnnnnnnnnnnnnnnnnnnnnnnnnnnnnnnnnnnnnnnnnnnnnnnnnnnnnnnnnnnnnnnnnnnnnnnnnnnnnnnnnnnnnnnnnnnnnnnnnnnnnnnnnnnnnnnnnnnnnnnnnnnnnnnnnnnnnnnnnnnnnnnnnnnnnnnnnnnnnnnnnnnnnnnnnnnnnnnnnnnnnnnnnnnnnnnnnnnnnnnnnnnnnnnnnnnnnnnnnnnnnnnnnnnnnnnnnnnnnnnnnnnnnnnnnnnnnnnnnnnnnnnnnnnnnnnnnnnnnnnnnnnnnnnnnnnnnnnnnnnnnnnnnnnnnnnnnnnnnnnnnnnnnnnnnnnnnnnnnnnnnnnnnnnnnnnnnnnnnnnnnnnnnnnnnnnnnnnnnnnnnnnnnnnnnnnnnnnnnnnnnnnnnnnnnnnnnnnnnnnnnnnnnnnnnnnnnnnnnnnnnnnnnnnnnnnnnnnnnnnnnnnnnnnnnnnnnnnnnnnnnnnnnnnnnnnnnnnnnnnnnnnnnnnnnnnnnnnnnnnnnnnnnnnnnnnnnnnnnnnnnnnnnnnnnnnnnnnnnnnnnnnnnnnnnnnnnnnnnnnnnnnnnnnnnnnnnnnnnnnnnnnnnnnnnnnnnnnnnnnnnnnnnnnnnnnnnnnnnnnnnnnnnnnnnnnnnnnnnnnnnnnnnnnnnnnnnnnnnnnnnnnnnnnnnnnnnnnnnnnnnnnnnnnnnnnnnnnnnnnnnnnnnnnnnnnnnnnnnnnnnnnnnnnnnnnnnnnnnnnnnnnnnnnnnnnnnnnnnnnnnnnnnnnnnnnnnnnnnnnnnnnnnnnnnnnnnnnnnnnnnnnnnnnnnnnnnnnnnnnnnnnnnnnnnnnnnnnnnnnnnnnnnnnnnnnnnnnnnnnnnnnnnnnnnnnnnnnnnnnnnnnnnnnnnnnnnnnnnnnnnnnnnnnnnnnnnnnnnnnnnnnnnnnnnnnnnnnnnnnnnnnnnnnnnnnnnnnnnnnnnnnnnnnnnnnnnnnnnnnnnnnnnnnnnnnnnnnnnnnnnnnnnnnnnnnnnnnnnnnnnnnnnnnnnnnnnnnnnnnnnnnnnnnnnnnnnnnnnnnnnnnnnnnnnnnnnnnnnnnnnnnnnnnnnnnnnnnnnnnnnnnnnnnnnnnnnnnnnnnnnnnnnnnnnnnnnnnnnnnnnnnnnnnnnnnnnnnnnnnnnnnnnnnnnnnnnnnnnnnnnnnnnnnnnnnnnnnnnnnnnnnnnnnnnnnnnnnnnnnnnnnnnnnnnnnnnnnnnnnnnnnnnnnnnnnnnnnnnnnnnnnnnnnnnnnnnnnnnnnnnnnnnnnnnnnnnnnnnnnnnnnnnnnnnnnnnnnnnnnnnnnnnnnnnnnnnnnnnnnnnnnnnnnnnnnnnnnnnnnnnnnnnnnnnnnnnnnnnnnnnnnnnnnnnnnnnnnnnnnnnnnnnnnnnnnnnnnnnnnnnnnnnnnnnnnnnnnnnnnnnnnnnnnnnnnnnnnnnnnnnnnnnnnnnnnnnnnnnnnnnnnnnnnnnnnnnnnnnnnnnnnnnnnnnnnnnnnnnnnnnnnnnnnnnnnnnnnnnnnnnnnnnnnnnnnnnnnnnnnnnnnnnnnnnnnnnnnnnnnnnnnnnnnnnnnnnnnnnnnnnnnnnnnnnnnnnnnnnnnnnnnnnnnnnnnnnnnnnnnnnnnnnnnnnnnnnnnnnnnnnnnnnnnnnnnnnnnnnnnnnnnnnnnnnnnnnnnnnnnnnnnnnnnnnnnnnnnnnnnnnnnnnnnnnnnnnnnnnnnnnnnnnnnnnnnnnnnnnnnnnnnnnnnnnnnnnnnnnnnnnnnnnnnnnnnnnnnnnnnnnnnnnnnnnnnnnnnnnnnnnnnnnnnnnnnnnnnnnnnnnnnnnnnnnnnnnnnnnnnnnnnnnnnnnnnnnnnnnnnnnnnnnnnnnnnnnnnnnnnnnnnnnnnnnnnnnnnnnnnnnnnnnnnnnnnnnnnnnnnnnnnnnnnnnnnnnnnnnnnnnnnnnnnnnnnnnnnnnnnnnnnnnnnnnnnnnnnnnnnnnnnnnnnnnnnnnnnnnnnnnnnnnnnnnnnnnnnnnnnnnnnnnnnnnnnnnnnnnnnnnnnnnnnnnnnnnnnnnnnnnnnnnnnnnnnnnnnnnnnnnnnnnnnnnnnnnnnnnnnnnnnnnnnnnnnnnnnnnnnnnnnnnnnnnnnnnnnnnnnnnnnnnnnnnnnnnnnnnnnnnnnnnnnnnnnnnnnnnnnnnnnnnnnnnnnnnnnnnnnnnnnnnnnnnnnnnnnnnnnnnnnnnnnnnnnnnnnnnnnnnnnnnnnnnnnnnnnnnnnnnnnnnnnnnnnnnnnnnnnnnnnnnnnnnnnnnnnnnnnnnnnnnnnnnnnnnnnnnnnnnnnnnnnnnnnnnnnnnnnnnnnnnnnnnnnnnnnnnnnnnnnnnnnnnnnnnnnnnnnnnnnnnnnnnnnnnnnnnnnnnnnnnnnnnnnnnnnnnnnnnnnnnnnnnnnnnnnnnnnnnnnnnnnnnnnnnnnnnnnnnnnnnnnnnnnnnnnnnnnnnnnnnnnnnnnnnnnnnnnnnnnnnnnnnnnnnnnnnnnnnnnnnnnnnnnnnnnnnnnnnnnnnnnnnnnnnnnnnnnnnnnnnnnnnnnnnnnnnnnnnnnnnnnnnnnnnnnnnnnnnnnnnnnnnnnnnnnnnnnnnnnnnnnnnnnnnnnnnnnnnnnnnnnnnnnnnnnnnnnnnnnnnnnnnnnnnnnnnnnnnnnnnnnnnnnnnnnnnnnnnnnnnnnnnnnnnnnnnnnnnnnnnnnnnnnnnnnnnnnnnnnnnnnnnnnnnnnnnnnnnnnnnnnnnnnnnnnnnnnnnnnnnnnnnnnnnnnnnnnnnnnnnnnnnnnnnnnnnnnnnnnnnnnnnnnnnnnnnnnnnnnnnnnnnnnnnnnnnnnnnnnnnnnnnnnnnnnnnnnnnnnnnnnnnnnnnnnnnnnnnnnnnnnnnnnnnnnnnnnnnnnnnnnnnnnnnnnnnnnnnnnnnnnnnnnnnnnnnnnnnnnnnnnnnnnnnnnnnnnnnnnnnnnnnnnnnnnnnnnnnnnnnnnnnnnnnnnnnnnnnnnnnnnnnnnnnnnnnnnnnnnnnnnnnnnnnnnnnnnnnnnnnnnnnnnnnnnnnnnnnnnnnnnnnnnnnnnnnnnnnnnnnnnnnnnnnnnnnnnnnnnnnnnnnnnnnnnnnnnnnnnnnnnnnnnnnnnnnnnnnnnnnnnnnnnnnnnnnnnnnnnnnnnnnnnnnnnnnnnnnnnnnnnnnnnnnnnnnnnnnnnnnnnnnnnnnnnnnnnnnnnnnnnnnnnnnnnnnnnnnnnnnnnnnnnnnnnnnnnnnnnnnnnnnnnnnnnnnnnnnnnnnnnnnnnnnnnnnnnnnnnnnnnnnnnnnnnnnnnnnnnnnnnnnnnnnnnnnnnnnnnnnnnnnnnnnnnnnnnnnnnnnnnnnnnnnnnnnnnnnnnnnnnnnnnnnnnnnnnnnnnnnnnnnnnnnnnnnnnnnnnnnnnnnnnnnnnnnnnnnnnnnnnnnnnnnnnnnnnnnnnnnnnnnnnnnnnnnnnnnnnnnnnnnnnnnnnnnnnnnnnnnnnnnnnnnnnnnnnnnnnnnnnnnnnnnnnnnnnnnnnnnnnnnnnnnnnnnnnnnnnnnnnnnnnnnnnnnnnnnnnnnnnnnnnnnnnnnnnnnnnnnnnnnnnnnnnnnnnnnnnnnnnnnnnnnnnnnnnnnnnnnnnnnnnnnnnnnnnnnnnnnnnnnnnnnnnnnnnnnnnnnnnnnnnnnnnnnnnnnnnnnnnnnnnnnnnnnnnnnnnnnnnnnnnnnnnnnnnnnnnnnnnnnnnnnnnnnnnnnnnnnnnnnnnnnnnnnnnnnnnnnnnnnnnnnnnnnnnnnnnnnnnnnnnnnnnnnnnnnnnnnnnnnnnnnnnnnnnnnnnnnnnnnnnnnnnnnnnnnnnnnnnnnnnnnnnnnnnnnnnnnnnnnnnnnnnnnnnnnnnnnnnnnnnnnnnnnnnnnnnnnnnnnnnnnnnnnnnnnnnnnnnnnnnnnnnnnnnnnnnnnnnnnnnnnnnnnnnnnnnnnnnnnnnnnnnnnnnnnnnnnnnnnnnnnnnnnnnnnnnnnnnnnnnnnnnnnnnnnnnnnnnnnnnnnnnnnnnnnnnnnnnnnnnnnnnnnnnnnnnnnnnnnnnnnnnnnnnnnnnnnnnnnnnnnnnnnnnnnnnnnnnnnnnnnnnnnnnnnnnnnnnnnnnnnnnnnnnnnnnnnnnnnnnnnnnnnnnnnnnnnnnnnnnnnnnnnnnnnnnnnnnnnnnnnnnnnnnnnnnnnnnnnnnnnnnnnnnnnnnnnnnnnnnnnnnnnnnnnnnnnnnnnnnnnnnnnnnnnnnnnnnnnnnngtcacgttgggcggcaactcggagatgtccatgtcgccgacgcctaagtacaccatgccgccgatttcaaacacctcgggtgggagttccctcattggattcccagtcaagtacaggtagaacgggttgagtcgtgccaataccaatggagcgctccttaactcgctgtattccacctggataatcgccccttccagccatttatgatccaagtcagggggtaagtcgcgcaggttggtgacgcatatctcgatatcatacaaactttgggggaaatcctccgactggaaccctgccggcaacaaaccgtccgtcatattcacacggacgatgaacaatgttgccacttgaggatggttcgtattcgtgatggctgcagactcgccccagtcaatgatagttgagttgtacactttgacgcctcggaggttgtggaagtcgctgaagatgtcgggcacttcaagctcaggacagtgtcggatcaggagctggacaactgtggaggcgtcaaactcactccatttatcctgcacttgttgcatattgccggatatttctaaagtatggcaatcaagtccagccagatagcaggaggggagggaagccgtccatggtctgacttgcatcaggcattgagggagtgtcggtcgcatcgatgcgtggatatgaagtccgagtatcacgaacccccaaaccgcaaacattaggtgagctgcttgaaggagtttactgttagcatgatacgcccgccacttttcctgggatctcaagattatctgagctacagatttgttccgacggaaattatcaccaggtagaatcttcattcggctactaactttgcggtaaactctctgaatggggcacgggcaaactgcaacggtgttggcagcatccgctcgtgataaaatgcggttcctcttccgaggtagacgcgatatcaatgtcctcatgctaagcgtagtaacaaccaacccgagcgagaaaattattcgactcacaagatccgaccaggaaacgacgacgatcatctggaattcgttcaaggcacgagcgacccactcgtcgttgtaccagataatcccgctaaacccctgcactttcggatcgtagtccttcacgtattccagcagcactatcagctcaatccccatagaagccatgaggtccagcaagcagtcgagtacggtacacacgaatcttctgcgggctttgtcgtgtttgtagatggcgacgtcaattagtggggatgtccagcaattaatcacgagtaagacgacgtaaaatcgattcaagagaactcgtggcagtaacgcactcattcgataggcttgaacagtctgcagtgctgtctcgacgacttcacgagatatgagcgcgacttcaaagtatttccctttcactccaaaaacgctgaatggatacgtaactctgtcgtaaaatgcctctaggcggtcgaagaaagagttcgttggttcagttggtacttcaggaccaacggctcttgaagaccacggggtaaacgccagagaacggagccaaatggaaccagtcaacattagcaagatgcacaccccgtggatggctgacattactacgtgcgtgatagcgatggcattgtgataaggttgaggcatgccaatcttgtagaactcgaggcagacgttcaggtacgtggtcttgagcttccagtagcagtaggcgtacaccgcattgtagagacacgtaaccacgtgaacggcaaggatgatgaaccaccaaatcgcaaagaagaagtatgagagccgcacaacgtcagtcgagacctttggcgggattcgttgcggacgctccatcgatgaaccagcatccatcacgctttggatcgttgtgctttggttcttagttcgacttcgatgcgatgtactcggatctctattcttgtaccgaagatgctaaaacgcgcgtttctccgcccccatctctctaccccaaaaatggtatttgtagttctatccgaagtgggggcctgcttttagactactgtcatagtgactcactgccttcttgtaatctaagcttttggttgctcctcacggattagttgagcgattcatctccaacgcgcttcggggctctgtcggcggattttttggcgatgctgggggcatgaatttcagcggactaaatcccaacaatgaatttgtaacgtatcagccggacgcctgcttgagaccagcacgcgatctgatgcagcttccccaggcgccgcgacgtgtacagtacagtgactgggtcacggtgattgtcgaagttctgcacgtccaggagtggagcgaagtcgtgccgaagattcaattgtaccgccagatcccggatgtgcagtatatattctgcgtcaagatgtcggcagatctatgaaactggtcgtatgacctctacgacgtgaagctcaacctccctccgcttcctcagcttgcagttcgccattcattcgacattcgaaccgctaatactccgtacaccattgagatgataaaaaaaaccaaattaataaaatacctaattgaattgttataaatttaaaacaaataatctaaattaaatatttttcgtaaaagaaaaaaattaatttaaatacgcggcgcgctctaggactcgctccggatgcccccctgcctccgagctgtccggagacgtttgaaatcgatgtgcgcgacattgcgacccacgttttacgatttctttaaaaacgtgctctaccaagtcggcaagagctggggtaccagaaaacgcctgaatcaaaatcattgttttgttattgttgttttcgtaacgtaggcggggtgctgatagcgttgatactgtcgtcaaattcgagagggtatatagtatggagacagcagcactcggaaggaactagttgtgttttcttccttcatatgtgcatgagcgaaatccggcaactatgatcttcaattcaacaacaaactcgaccagaagaaggaaatgttggtgttgtcgatgctcgatgctctacttgaccgcttcggtttgaagcgcattgctgttcctacttcttcaaagtagttttattcacgacaaccactatcaggtagtagtatcaggtatctgcctctcgaaggctaagcccctcgtccgccggacaacgtaccgctcagcaacctgaagttgccgaagcccttcttgaactcctctcgattgagaaacaacttgcccgagtttggttagggctgcagactccacaacccctctgtcttcgttcgtaccagcttgcgatcgtagtaatcttttcgaggattccacatcgtcgggagccgtcaccaaatatggggggaaacttgtcgcgcgctgccatttccgctgactcgaaagaggaggcggcagcatcggagatgacaagcagcacaacgacggccagcaggaacccagaccgcacagtaacacagattcgggtcgttacactctactcgaagattgcgaagtgagactctccagctacggaacactgaacgcatgagattagacattaaaatacgctgatgtgacatgaaagtttagtacactggtaatgctacgtcagtattatgaataaacattatacatgtatagcccacgggatattcctaggtatcgattcaatacatttttcaagccgagcatgaccccgcagttggggctctttaaacagctttgggcagaatatgtggcagctcgccgtgcagttttaaatctcagaactatgcagaaaaatctgaaaatgtaccgacgttgacgaactttgatttttgttacggcaatccaacagtttagcgcgacgttgcgacccagttttacgatttcattacaaacgcgcactaccaagtctgcaaacgttgcgtaccagacacaaagtgtcatgatgcagcatgtctgctgctggcacccacgcaagcgggtacgccagcaacagacatgctcaaggaagacgtacctggtggctaggaagtcaggcgtcgcagcgccgccgcctcctcctccgccacaagtagcttgcgcgcagcgtcgcttgaaggctggcgccaggcttgcgcaagactgcctggcacccggaatccagaactctacctgaacaagtatacaaacatgcatatataggattacgaaaacagataaaaaacacttgcaaatagtataggttagctcagcttctagaacgacactaaggagaaagcaagaggaagacctagagccgtagctagcccaaagacttaaaggaatcaatctcactttgcatttttcccaaaagcaagcaagcaaccacaacaactccacgcactttcgctacggcaggccccaccgcattggagcctgtcatttggtaacacttgttggtcccctcgcaaccgggcttcgctcaacctcagggaggtcttcgtgcaccggctggagattcgcttttgaccgcgcttcgctcaccctcggagagggctacgggcaccgggcttccgcgtgcgaaaggagggcgaacaagatggcgcacatcatcggtcacatctcgccttggctgaggcatggtgtaatggtgtctttgggtccacgaagaagtttcgtcgtcctatgcaggacaggaagtttgtggagctgttcttcgtcaaggtctgtgtagcagtggaatctgacaatgtaccagactacattaagcctttgctggacaagtttggtgatgtcttcccagcaaatttgccagatggcctacctcccgagcgcatcgtcgagttcgacatggagatgaagcctaacgccgctcccagcacccgagcaccgtttcgattgtctaaaacggagcaagaagcattggaaaagttcgtcgcggaaaacatggagaaagggtggatagaagtctgcgattcaccctgggtctccaatatcttcggtgttcctacgaaagatcctgcgactggtcaaatcccgaagcgggcagaatggctgcgatccgggaatagttctattccgattcgttgggtcatcgacttccgctatgtcaacagtcagacgaagatcccgaagattccattaccgctaatcgaggaaatctttgacaagatggtcggctgcacagtgttctcgctaatcgaggaaatctttgacaagatggtcggctgcacagtgttctcggttctggacctgacccaaggttaccaccagatgcgggtcaagccgcgtagtcgtcagtacaccgcttttcgtactcacaaggagacttaccagtggtgtgtcgctccgatggctctgtcgggtatgcctgcggtttggtcacgactgatgcgcgtcctgtttcacaagttcgacttcgtcgtggtctatttggacgatatcggcgtcttttccaagaccaaagaagagcatctcaatgttgtggccgacgccctatcccgtccgagtcagcccccggcgactgattccgacgatgaagttacagacgagcccgagccttggaagttaccagcagttcatgattgttcgtcatcctgtacgcatcaaacttcgaggcttcgacgtcacagtgtccacgcagtaatgcttcgcttgcttctgcccgacgaacgctgtcttcttctcgacgatctggacttgcggggggagagtcgccctattgggattcagcaagaagtcaatgtgcacgtggaacaagtccagaacgtcgagtactcgacatccagcgtgcatttaagcgatgatcagaagaagaagttccaagctagatacaagcgagaccccgcgttcaaagaagtcgaccgaacaaatctgcagacttcgttaaatcgaatgggctcctgtacaagtgttcggatcattcagtcatgaggctgtgtgtccccaataatgctgggctgatcacgaacatcttgcaagaattccatgatgcacatacggcagctcatcctggaatccgtcgaacgcagttgagggttgctcagtggtacttctggcccacgttggagaaggacacaaaggaatacgtggcaacctgtgggacgtgtgctagatggaaagtaagtaccgcacgcaagaaaggcactatgattgtaacaggattgcacgcacaagtggctacagtcacttgtaactctaacagatacgacgtctgttagaggttcgaaagactttctcgaccttggtgtagacacaccaaaggctacatacatttacgaccaccacgacgggtggtccatacagacttaggattcctattggctgagagcagcatctcttagccaatgagcgacatgcatagcattggaattctgccaaccagccgttggcagattcctatcttagaatattacatttagaggaagtcaggaacataaaacaaaaatagcagttctcattttaacccaaaaacattatttggatcgtttatttagattaatctatactcggaggcccgagtataattaactctaagttaaactaagctacgcttcctcacatacacgcgcacacgtgtcagctaaagtagtgagccgaagtaggcccattacacctggtagcactttgtagcccgtccaacgaccgactatctgagctcgtacgtcaccgcacgaacgcggagcagagaacgttcccatggatacggaggtggccatggaaagctccactacgcctgcaactcacgttacatgcgctgactgtccccacctgtcggacccagagtgggaagctctccaacgactgtcaacagtcattggtgaggcggctgtagctacgatgctgcgtacgctaacgccgacagaggaacatggcgttgctctgggattcatcatgagggagcagcgagatgcagcttcgtctgccacggtgtcgtcggagacgacaccgcgcgcgcaatcgctgaagctcagcgtgagcaattacgttggaagagagggcgagcctctcctccgttggcttgtcgaactcgacacttccattgcggctcgacgcatcgtcgacccgttgtcgaaggtcgcgttcgccatgtcatgtcttggcggacgtgcaagaagttgggcgtatggacgccgactctcagatcctacgtgctttagcacgtacgagggtttcaaggaagagctcagacaagcgttggagcccccgcaaaacgagttccggtcgagggcggagtttctcgacctgcagcagggcaagcatgatgtccatgcttacgctcagagagcacggtacttggtctcgaacatcgtgaccaatccgatcgacgaggcgaccaaggtcgtcacgttcatgaagagactgagagatgggcctgtgaagacctatctcttccgtgagtacccgagtactctcgaagctgtaatcactcttgcaatgcaggaggagtttagcctgcggcaggctaagctgcatgaacatgcgccgaggccacagcctcgcccgatagtgaggacgggaggcccagaacccatggacctctcgagcgctgcaactgctggaccccagcagtcgcaacgaaacaatgtgcgatgctaccgatgcggtagaatcggtcactttgctcgggagtgcacggcccccgtgcaccagcagggtggctatcgcggcggtgccaggcaccgtcgcaaccaaacaaaaagcgctggacgccggtaggcgcggggcgccctactggtaatgcagttccgcgtgtcgaccttggacacgcgacactgaggactgtagccccgagtgagattcattctcactgcaagaaccaagatgacaagcatgaccttgtcatcctgaacgtgaactcgatgagagcaagcggctctctccgtgctttggtagattctggcgcgtcgaagaactttgttcgactgcgaagtttatcagggcttgacttcgaggatttaaagatacctcgaagtatgctggaagtacgactggcaatgggtgccatcgtaaagaccgagaagcgtatggtacgcgtgcgcttcacgtatgaagatcaagagtttgtcgagacctttatcgtcctggatctggacgataagtttgacatggtattgggcatgccgtggcttgcacggtatgatccggtcatcgattgggagaagcgcactctcgtgcgcttcggtcgcgacagcggaacagtgagcgatggccctgttgctgctacgcacgcaccgacaggtgcgcccgactccccactcgagacagcgcctaatgccgccgtcccggagcgccctgggcgcgcgcgagcacgcgcgcaagagcagcaagcgtcggcgtcgccgccgacggctgaaggagaaaatgtgttgatctcggagatcgacacccgcttttcagcgaatcaggaagagtctccgacctcaaggggtacggatgacacaggcgagtcacacgcctcagccgtgggggctgacgcgaatctgattggatcagttttggccaataacaggagccaaggtgacgaaacgccgtcgactccgggagtcgatggctcggacgaatttgtttcgtcggctcggggagccgacgcaccctccgtaatgggggtctccgccaatggttggcgtcgaggtatcgaagccgcatcgactccgggagtcgatagcatggacaaatttgattcgtcggctaggggggccgatgcaccctccgtaatggagggctccgccaataacaggcgtcgaggtaaagatggcgtgtcggctccgggagccgacgctgcaggcggtgcggacggttgcaaacgtcccgcacaggaaaacttgcatgctgccgtgcagccgggctgcacgacgaagcgccgggcgaccaagccggacttgaagtcgctcgcccgcgggatgaacccgccggcggtactaaagaagaacacccgtccacggctgggcctggacgaggtcaagaaccgagcggagccgggctccgcaaaacaagaagacggcgtatgcgaagatcgctgcgcaagtctcggcctggggccgagacgctacaaggaatgtctgccgggcagacggaggctgagaagccggacgtggagacgttaaacgtcttgacgcgtacctgtgccgggttccggtacagggagataactctcgctaaccctccgacgcaagcgtcggagttgacttcgcttccagtcatgagctggaagcgcttcgcgcgtgacttgcacgatggacgcatcgagcaaatatgcattctctcggacgccgaaagaacgaagagcgagaatgaagaactgaggcagttcttcatggagaccaccactgagagcgaggacactctcagtgcgaagacgaagaaggagcgctttgaagagcagagctgggactcgttgaaaacgagtccctactacgagatcttacgggagtacgcggacgtacttccggaagcgattcctgcggagcttccgcaggataagagcatccagcacgagattgatctcgtgccggggacgaagtactgtgtcacgcggcagtggccactaccgcgagagcaggtcaaggcgatcgacgacttttttgagagtcgtcgcaaagctggacaagtgcgggaatcgaaatccccgcacagtgctccgacgttccgtgtcaagaagccacagggcggctggtgcatcgttcatgcgtacaacaagctgaacgatgcgacgataccggcacagacaccgataccgcgaaaagatgtcatcatcgattcgatggccaggagcactatctacagtgctcttgatctgcgcgatgggttctatcagatcctcatgcgtgagagcgacatccctctcacggctgtgagcacgccgagcggcatgctctgggagtggctagtgatgccgcagggtctgaagaacgcctctgcgaccttcaacaggtgcgtgacgcacttgttgcgctcggtccgcgacttcgcaccgagctacttcgacgatgtgttcgtccacagccgggctgcggacgggatgagcgatgttgagatgcacaaagtgcatctctggaagctgcttgcgctcatgcgcaagcacaagctctatgcgaacctgaagaagtgcatcttcggggcgagcgagatacccgtgctcgggtgtctcgttgggaagaacggtgtccgccctgaccctgagaagatcagagtgatcaatgagtggccgacgccgtcgaacgtcaaggaactgcggcagttccttggcttggccacgtacttgtgcaagtacgtgaaggactacgcgggcatgatacgccctctgtcacagctactgaagaaggacaccgagtgggtttggactgctgagtgtcagcaggcctttgatgcagtcaagcggggcatgactgaggcgccgatcttggcggtggccgaccaagatcgcccattccacgttgtgtgtgtcgcatccgacttcgcaatcggatgtgtgttgatgcagcacgatcacgagggccgtgatcgtttcgtctactaccaatcgcgtcagctgaagccagctgagcgcaactacccggtacttgacaaggaactccttgccatgaagtacgcactcgcgaaattccgagtatatctactcggaagcaaaccgttcgtggtctatacggaccacgcgtcgctgcggacggctgtgaagtcgccgcacatctcgcaacagatggcgagatggctctcattcttcgcagagtataactttcgggttgagtacaaacccggaagactcaatgtggtggccgacgcgctctcgcgtcgacctgactacgccacgactgatgccgacgtcaatgccattgacgccatgcgatcgagcaccccgacgtcgtcactgttggacgacgtgaaggtcgcgtacgcgcacgacgcggacgcgaagctcttgctagcctacggctcagcgccttctgacaaagctcgtccgaagctgccgaagcatcttcgtgctcgtgcacaccgttatcgggtgcacgacgggttactactctacagtgcagtcgacgacaacacggaccgcgttgtcgtgcccaatgaccatgacctgcgactcaggatcatgtatgagtatcacgatgcgtcgactgcggggcatccgggccgtgagaagacataccttcttctcacgcgagacttctactgggctcaccagtataaatgggtgcgcaagtacgtccgtgcttgcgaggtttggcaacgtttgaagcctgcgcctttcgcgcaggctcccttgcagtcactaccaatccacgggagtgttggcagtccatgtctttggacttcgtgttcggtcttcccccggacagccaggggaacatgggtgttgtggtctttgttgaccgcttcagcaagatggtacatcttgctgcggtacccgctgaagtgactgcgaaacagacggctcgtctgttcgttgacatggtgttcaaacaccatggcatgccgatcgacattgtgtcggatcgagacccgcgcttcactgcacacctttggtaacagtgtttacacttcttgggagtcaactttcgatgtcgactgcggatcatccgcagacggactggcagaccgagcgcgtgaaccgcgtgctcgtagacgtgcttaagagctacgctcactcggctcaacactggagcgagtgtctgccgatggcggagttcgccatcaacaactcggtgcatgcctcgaccgggcatacaccgttctacgtgaatgccatcaggcacccacgcctcccgagtctacgcaggatggtggccccttccttaagtgggggaggatctacgactgcaacgcagcagccgcagaataccgctgacacttgcacagtgtcagccgcgactacgcgcaagaagaacaagaagcacgcgtctgtgcagggcacagacgctgacaagagcaagaaaaagaagaagaacgggtctgtgcagggcacagacaccgcgaagacgaacgcagaggccgggcctactgctagaaacgagctgaacgagttcagctcggacgcaatcaacttcgtgcagcgcagacaagccgtcattcggtttgtccaggacgctattgcagcttctgtcgaccgacagaaggtgaacgcagacaatgttggtaggggcaacactaatgaattcaagaagggttcattggttttgttagcaactcaaaacctgccaaaacatacagtttttgacttcggggcgagcaagctcgctccgcgcttcatcgggccgttcacggtgttggcacggcatggcaacgcctacacgctagatattccatctagcatgcgcctccatccgaccttttacgtcgggcggctgaagccataccggcagcacgagccacctagctcggctggctcgaagcggaagccccagcgggagcgaacctctgctccagcgcgtgaacgcgctgggccaagcgtgcgacgcgacctcccacgtcgacagagatgtccgacgcggtctgcgaagcctgagcgacttgagccctcaggatcgccacctcctgcttcagagcggtgaactcccggctctgatgctgttccacagcagcgacccgctcctcgagcgtcgggccaaggtcaccccaggttgaccatacccagggcgtgttcccaccaccgccgcctccgatccgcgacgcccgcggctcaacacgctggattgttgaccgtattgtgaaccatagtatcccaaaaccgaaccggcagccggttcgttatcgtattcgttggagagggtttccgccccaccaagatacatggacgtcctgctgcaggacgttccggaaatggtgagggcgtacgaaactcaccacgcactgccgacgcgaaggtagtgcgagagctgtggtcacctacagcgcccgaggtcccacgatcgtcgcgttcctcgcgtgccaagaacttggcacggagatccttgagactctcaggtacacgaatcgtcgtgtacccgtttaggtcgcggtcgctcaagcgcaccgcacccggaagacacaacgtgcactgatggccttcgggcacagcgcatggaataccagcgtccacagaggatctgtggagctgctccaacctcccgcgcgtcgagaatgtctcgaagtgttcacgggcgtgcttaacccgctcacggtaagcagccggcttcttgttgaagttctcaacaaaagcattccaactttgacaaagtgcctgccactcaggcactttgctgcgagaagaggtcttcttgctggagaagtatcggagctcgtgaaagagtccgatatagtaatcgcgccttggattcgttaacggatcgaagtgctgctcctccgccacagcatcgtcgtggataccgctgcatacgtacagcgggatttcgtttggaggcacagtgttgcccacacggtctgcgatctctgaggcagacggcatccacggatcgcgcgctgcctgagcagcgcgcggagagcttgaaggcgccacctcacgcggagagcttaaagccccagcagcagagagcggagtgtcgctctcgccgcgcgaacgctttgagctcgaagcgtccgagtcgtctccttcacgagggcgtctcgacccggcatgcgggtcgagactatcgctgtcgatagactccatgcgcttgctagaagaggcctcgccctcttccatctccacgtcgccgtcctcgaagtcaacggcgtcgttgactacagaagaaccttcgaggacaatctctggttgagttgtccccgacgcggcctttgcagcgagcgcgtcgcgctttacctgctggcgctcatggtactgagcaacagagaggttaccctctgttgcggcggcggtcttcttctgcggcgagctcattgcggaatgagctcgatttttctttctcccaacgtgaagaattgacgaatggtcaatttcctgattgacgtgccgtgactcggcgcgtctaaccttaagggggggatggtgtaacaggattacacgcacaagtggctacagtcacttgtaactctaacagatacgacgtctgttagaggttcgaaagactttctcgaccttggtgtagacacaccaaaggctacatacatttacgaccaccacgacgggtggtccatagagacttatgattcctattggctgagagcagtatatcttagccaatgagcgacatgcatagcattggaattctgccaacggctggttggcagattcctatcttagaatattacattttaaggaagtcaggaacataaaacaaaaatagcagttctcattttaacccaaaaacattatttggatcgtttatttagattaatctatactcggaggcccgagtataattaactctaagttaaactaagctacgcttcctcacatacacgcgcacacatgtaagctaaagtagtgagccaaagtaggcccattacaatgatgccaattccagttccgagtgagtgttggacagtagtgactatggtcttcgtgacaggactacctggttccaatggcttcgatgcaatcatgacagtggtggacaaactgtccaagcgacccaagtatattccgacacatacgacggcagatgccccggaggttgcacgaatcttctttgaaggagtcgttcgtcatcacggtctgccgaaggtgatcatcagcgatcgagaccccaagttcacatcaaagttttggaagtcgctcatggatatcatgggggtcaagttgtcgctcaccacggcatatcgagcccaagcggatggacagactgagcgtcagaaccttgtcttggaagatgcattacggtgcatggtgtcctatcatggttgagactgggctacgcatttaggaacaaccgagtacgcacatgcgacgctggagagctcctcgacaacgcttacgccgttcgaagtggacacaggacgcaaggtcaggaacttggtatcccagatcacatctggtgaagttcgtgatgaagatgtcccgctagttgattttgcgcagacgtttgctgaagaacgcaagaagatcattgaattggcgcgcaagaatctcctggcagctcaagaacgtcaaaagaagtactacgacaggaagcgccgagacgtggagttcaaggaaggagaccttgtcctgctggacacgcgtaacttgccactcaagcgcatcacggctaacacggagctcaaccgtgagaagttagcgatgaggtacatcggcccgctcgaaatcgagaagctaatcaactccaacgtagcacggctcaagctaccacgccacatgagtcgccttcacccgagtttcaatgttgagttcatcaagtatgacgttccgaaccctcaacacttcgcgtcgtgacctttgcccaagtctgcaccagtactcctcgacgatgaaaccgacgaagaactacatttcccagaggctctgcatcagcagaaacagcgcaacaacaaacggctttggctggtcaagtggcacggacttcccgattcggaaaacacttgggagtacgacgtcaagctcaaacgtgtatcgcattggcgtgaacttcttcacaagttccgtcaacagcgccaacgcgattaaaagtccagggggatgatatgatgcagcatgtctgttgctggcgtacccgcttgcgtgggtgccagcaacagacatgctcaaggaagacgtacctggtggctaggaagtcaggcgtcgcagcgccgccgcctcctcctccgccacaagtagcttgcgcgcagcgtcgcttgaaggctggcgccaggcttgcgcaagactgcctggcacccggaatccagaactctacctgcacaagtatacaaacatgcatatataggattacgaaaacagaaaaaaaacacttgcaaatagtataggttagctcagcttctagaacgacactaaggagaaagcaagaggaagacctagagccgtagctagcccaaagacttaaaggaatcaatctcactttgcatttttcccaaaagcaagcaagcaaccacaacaactccacgcactttcgctacggcaggccccaccgcatcggagcctgtcacaacgcctgagtcaaaatctttgtttggtttttatcggtgttttccaaacggaggtggggcggtgatagcgttgataccgtcgtcaaattcgagtgggtagtatggacctatgtcgtattccgtacagtcaacagcacgcaaaattgcgcctcggtttgtttcaaacgggtccattagaacggaagagtactcgggtgccggggacacttggaaagaactgctggagttttcttctatttgctcgagttcctcgcaatagaaagaccccccggcaacgaacataccaggattttcagtccgtccaacaaacccatctacccaggaccagaaaaaggaaatgttggtgttgtcgatctcgatcaaagacagcgacggcgatacatccgtcacattaggaggaagctgggaaacattcgtatcccccatgcctaaactcaccataccgtcgactccaagaatctcgggagggaggtcactaattggatttcctgtcaagtacaaatagtagggcttgaggcgtgcgagaaccaacggcagcgtctcaagtcgactgtactccacttgtatgatagctccttcagcccatttcacgtccaaatcgctaggtaaatcccgtaggttcgtcacgcatatttcgatgtcattcaaactttgtgggaaatcctcggactggaagcccgcaggtaacacaccgtccgtcatattaactcgaacgataaacagcgatgccatgtatggatggttcgtattcgtgatcgcggcagattccccccagtcgatgatagttgtgttgtataccttaattactcgaaggttgtggaaatcgctgaagatatgggggacttcaagcgctggacagtgtcggatcaggagctggacgaccgtgaaggcgtcaaactcgctccacttgtccagtacctgctccacgctgccagatattcccaaggtgtggcagtcaagtccagccaaatagcaggatggacgggaagccgtccaagggctgacttgcatcagacattgagggagcgtgggctgtagcgatgcgtggatgtgaaggccgagtatcacaaatccccatactccaaaaattatctgtgccacgagaaattttttactaccgctacgataccacatccgccttattcgactcgcacgaagcatcagagacgtaggataatggttcggctgtcgagcaactggtacgagagtgagcgtgttttctggctgagtcgactgcccacaaattgttctgatagcagtagaattcgtcgtggaaactcggttgctacatcgcggccgttgcagtatcagcttcttcatgctcatcgtagtaatgaacaacccgagcgagaataccgctcgactcactagatccgaccacgaaacaacgacaattatctggaactcgttgagtgctcgagcgacccactcatcgttataccaaattgttccatcaaagcctttgataccaggatcgtagtcatccacgtacgccagcagcacgatcagctgaatccccatacaagccatgagatccagcaagcagtcgagtgcaacgcacgcgaaccgtcttcgggcctcgtcttgcttgtggaaaccaatgtccaccaaaggagaagaccagcagttaattaccaacagaacaacgtagaagcgattaagaagagctcgtggcagtaaagcgctcatccggtaggcttggacagtctgcagtgcggtttccacaatctctcgagctctaagagccacttcgaaatattcgccccttactccgaaaagaccgcacgggtatgtgactttgtcgtagaattctccaaggcggtccaaagtcgatcctttccgtgctgcggcagtgttaacaccgaccttgcaagacgaccatggggtgaaattgagagagcgctgccaagctgatccactcaacatgagcaagatgcacgctccatggatagctgacatagtggcatgggcggcggcaatggctttgtggtacggttgaggcaacccgatcttgtaaaactcgaggcacaagttgagataagtgccctcaagcttccagtaagagtaggcgtagagtgcattataggtgcaggtaacaacgtgcactgcaaggataatgaaccaccatacagtgaagaccccgtatgaaagcttgacgacgttagtaggtgcctttcggtcttgatgcccggtagccaccatcctccccccgcgtgttgcagtctttacttttcccatgacacttgtgcttctatttgtgctacgtaggtctattttttgactgggggttcgtgcaacttgatctatcctatcagatgtaagtacaagactcgcgaacgctgcgttttgattagcattgtccgacgtagttttattcgtgatagactacagcagtagtaccagacctgtggccgctcaacgtagttgatgagctttttgagctcctcctctcgcacgagatacttggcatagtcttcaatagcgcggactcttgggtcatccttggagagtttgctgacatcgtcaatcttgaacacgctttttgctacctggttgggcttgaactctttcccctcccaaacaccaaactgaaaccgccgcagctcgctaaccagttttcccacacccgaagcctcttttaggttttgaagcagtactggcagctctgcttccgaagtttgccggtataggaaagcgtatgtgctatgcactttaaagcccgacttgggattcttctccatgtacgcgttcgtaagtttgagccattgcaaccaactcgggttgccgtcaagtttcacccctgccatgttaagacccagcaacttgaacgcggacatcgggtgcacgtcaaccttcagagtgccagccgccaaatgagcagcacgttgtacgagcttggttagggctgacgactcggccccattcgtaccagcttgatagcgtaggaaacgattcgtcattttcacgtttcgggctgtcatcttcatcataccgccttgttcggacgacacgagtgcggaggagccaacgtcgaaggtgccaagtaacacgacggcgggcagcaggaacgcacaccgcattgccataccggtactttggtcgggattctttgctcggagattgcaaagtgagagcctcccgtccactgccactgcacgcctgtcatgaagttgtctaatcatgattagatggtaaatgctgtactaagcgcgcagagatgggaaggtaaatgcaccacgtactgtatgacaccttcattggtatgtgccacacacccaaaattgtcttctcgctagtcctccagcgaaaaacaatcggccgcataccgatccgcaagcctaatatgccttttatccgtgtcttggtagtgccggcggaggctgcaaggcgttggcatcatcatcgaaagcgaggggataaaatggtgcttcagcggagtcgcagtgaacaatctctgcgatcacttgcaggtttgcgtcagaccgatccatcagaactgtcgaatactccggcgtaagtgagctagagaatgtatcaaccatactgtcattttcaatcttttccagatcgtcgcagcagattgagcctccagcaacaatagtcgcaggaccatccacacgccccacaagttcgtctacccacgaccagaagaaggaaactctggtgttaactagctcgacgtaaatcaaatcaggaaacacttgcgtcacattttggggcaattcacggatatttgtcccgctaacgcccaaatagaccatgccttcaacctcaaaaatctcagcaggcagctccgtgatcgggttcccagtcagaaacgtatagtaaggctgaagtcgagctagcaccaacggtaaggctgaaagctcactgtactccacttgaataatcgctcctaggggccacttagtgttgagatcacctggtatttcgcgcaaatttgtgacgcagagctcgatgtcgttcattttctgcgggaaatcgctcgactcaaatccttcgggcagcaagccatccgtcgagaaattcacacgaacgatcgacatgtacgttaaatcggggtgcttcgtgttcgttatcgcggctgactcaccccaattactgatgatggtgttgtatattttcattccgcgtaggttgttgaattcacttataacgtcagggacctccaacgcagggcaatgacgaatcaatagttgaacatccgaggaggcgtgaaactcactccacttctcgtgcacttcttgcatgtttccagatatccccaagatgtgacagtccagtccagccaagtagcacgaaggtcgggatactgcccatggtcttgcctgcatcaaacactgcggtaaagatgctcgaagcgaggcgtggatgtggaacccaagtaccatcaagccccaaacaccgaagagtacgtgagctgtacggagtacccgatgtttcgcgccagtagtgcgaacgattgtctccctgttgctgtccttgcgcttaaaggatggtcgtttgaacatgaccggggtgttagaacgcttgatttgaggttgtgggcttacggcgctgcgcttcttcacccaaaacggcggacttaccgcgtcggactcagacgagcgtgtgcttcacgattgagaaacacgcttggtatctctcgttagatatcgcagtaaatccttcatgtccgctgtcgccacgaccaagctaagcgaaaagatggagcgacttgcaaggtctgaccacgaaactactacgaccatttgaaaatcgttcagagctcgagcgagccactcgtcgttccaccagtactcgtagtcgaaacttagagtctcacgattgtaggcggctgcataactgagcagaataatcagcacgatgcccatacacgcgacgaggtccagaatacagtcacacacaatgcaagccagtcgtttctgcgcttcccctcgcttgcgaaacactgagtggacaatgatggacgaccaacagttgactgcgagtaagaaaacgtagaaccgattgagcaccgtcctaggtaacagcacactcatgcggtaggcttggattgtctgaaaggtggtctcgataacctcacgccagatgagaatttcgtagaaatgagctccgttcactccacaaaatccgtgtcgaccccaaatcttgacaactcccgtggtgataatactactttttcgcgttccagcgtttccggaattggtcttcgctgtgttgtttatttgggcgatggagctgtcccaccacggagagaacgctagtgacaattgccacagagagccccctagcattagaagaatacaaactccgtgcactgcagacatgactgcatggacgactgcaattgtgctatggtattcctgcggcaggccgatgtggtagaactccaggtacacgagaagtgaggcgtctttcagtttccagtagcagtaggcgtacagggcattgtagacgctggtgaccacgtgcacgcctaggataatgagccaccaaagcgcaaacccccaatacgaaagcttgaccacgtcgggtgcgaccttctttgaaggctgctgtactgggggagcatcgatgtcctcacgaagtgcggcgctggttctgcgattcatcgtcaatgaagttggttggttggtctgttgcttgctgccttcttgtcgacgacaccaatggagctcgaagttcgtcgctgagcttgggcgatgctattctcgttcacggtaccaaaatgcacgatgagctttagatttattaataattgttggccaagaatcctataagaaatgctttcttcaaaattatgtgaaaatatcggaatatttattaaattacatttctctagcatccttcgcttgcaaatagccatattgtttgtcttttcatccttgtctcgctagtggaggtggagtgctaatagcgttattgttgtcttccatttcaagagggtagaacagaccgtgaatggtggggtcacaacggacagccttcaggattacgtttcgattgacctcggacgggtccatgagcgtctgcgagtactcgggcgataaagggacgctaaacgcagtggctgagccgttcacgatctttttaaggtcgtcgcaatatggagaaggcccagctagccacggataggctttgcctttcatgcgctccacaagttcatcagtccacgcccagaagaatgaaatattggtgtcgccgatgaagatccacgacagctctgacgacagttgagtaacttgttgtgggagttcagtgatctgcatgttgctgatgctgaggaaaagcatgccttggacctcaaacacctcggggggaatttctctgatccggttcccagtcagtgctatatagtagggctcgaggcgagccaagaccggaggcacgacggttaactggctgtactccagctggataatcgagtacagcggccacttggtgtccaggtcttccggaagtgttcgaagattcgtcacgcaaaactcaaagacatacaaagtttggggaaaatcggccgactggaagccttcaggcaggagaccatccgtcatattgactcggacgatcatcagcgaagtcattgccgggtggttggtgttggtaatggcagcagattcaccccactcatcgatagttgctttgtacactttaatgtttcgaagtccgtggaactcagtgaagatgtgggcatttccagcgccgggcagtggcgaataagcaattgcacgacggtggagctgtcgaactcactccacttttcttcaacttcaatcattctaccttcgatgccaagtctgtagcaatctagtccaaccaggtaacacgatggacgagttacaccccaaggtctaacctgcattaaacattggggaagtgtcggctgcagagaggcttgaatgtgaagccccaatactaacattccccagcacgcgaacactgtgtgaactgttttttgcagcaatttccccgcacgaaaccgcaaattcatttgcagttggttcaacgtggactcgtctttcagtttcgacacgcttggattgggggcattgggcttacagggttgatgctggggctccaaagatggtcgtttgtagcgaggacatgttcctatgctggcagttgccacaacaacgtcttcatacttgcagtggtcatgacaaggcccagtgagaagatggcacggctggccagatcccaccaggagacaacgagtttcatctgacactcgttcaactcacgagctacccactcatcgttataccaaataatctcagggaagcccaagaatttcggatcgtactgacccacgtaactcagtacaacaatgatctccactcccatgtatgccataaggtcgagcacacagtccaatgcaatacaagtgaatcgtctgcgcccctcatcacgcttgaacaagagtgaacaatcactgacgaccagcaattgactacaagcaaagtgacgtaaaatctgttaagcagcatccgcggcaagagcaggctcatccgataagcttgtacagtctgcagcgctgtctccacaagctcgcgactaatcaaaaccacgtaaaagtactcgcccttaactccacagactccgcacggagtcgttatcttcgtatacgcttttgagaagctccggaaaagagcagaactggtcgtacgatcattgttgaatccgttggtcgagcctggaatacaagatgaccacggtgtaaacgccaacgaccgctgccaaactgatccaacaagcatgagtaagatgcagatgcaatgaagcgccgacatggtcgcgtgcacgatagcaaccggtaggtggtacagagatggcatgccgatattgaaagagtcaagatagaggttcaggaaagtgtcctccagtttcaaatagcagtaggcgtatagtgcgttgtagatgcaggtcacgatatgcacaacgaggatgacaaaccaccagaaaacgaacgcccagcccgagagataaattcccttcgttaagtgaagagtatggcctgccatgttgcgaagttacttgtgacggacactgcaagtttctgaatgaagtgaagtgggcattactcttggaagctcctgtggcaccagactagcgctattatcagttcattttggccccaatacttatccttttgagtcgttataggtgcaccttaaccggtttctggttaggagccaaacttgcaaggcgcttccgagcaggcatttttcttcaaaactgttgcgttgatccagggatgttttacttcttatacccttaattaagaattttttttttagggttcacaaattacagcgagcataccctctttgtctgcttttttttgccgttgaagtcgacgttgtaacgttaacacaccattgtcttcactttggacgatggagtgggcagcatgtctgaagattggagtgggcacttgcttaaagatactgggatgagagtcactgtgttggagtgacgttcgattgagcaggtgacttgagaattccgtcaaggaccaacaaatgaactaagctacgatttcgtttcggacgcttatccactcatatcaaataaatacttcatcggtgatcacaaccgtattactctgcgaactgcgcggctgggcaacgctttccttcaaaatgctcgcagatcggtggcttgtgccgttgtgcagactatcagatcattcagtcatgttatctttgaggaactggcgtcggcaagctttgacagcaactttcttttagtaggggtgatggctgatcgagcgttgctttgaatagatgaacagctaccggttgtagtactccttgatagtctgtgatttacatgcttgatgaattgctttcctctatcgctgggggttgaagaagatcaagactaagacgtcgaatcacgaatcgttcatgcgagttcaaatggcagctgagaaacggcacgcgaccagcaatcaggaagaacaaggtttgcaccacatcagcatcaggatttcgctaccaaagtccatgaagcgctctatcttgtcaccgtccgaaagcttggcatcgaaagccataccgatatcgtcaatcacgatgaacaatggcccaacttccatcgtcagattcaccaaaacagcttgaaaactcggatcttttccgatcccacagctcgagcaacggtgccatattccgtgctgaagaataacgcgatctttccaatcaatctgctagcagcttttctactatcaaacgtcaagttactgtccaggaggtcccaactatggaattgaattctgatcgtatgacacttccgcacgaaattcaagaagccgttcatctccttctcaacgtcggacaaccccttccagtgtcggttgcaactctgaatgtactccatgccgagcgtcgacttgcctaggccggagaaatgatcgaccaaagggaccacccaggtcataccgcaccctgtcttagcgcaatggtagttgctttttttgtagaagctgctgcttcgcactatcccggccaacgaaaaacattctgtctgtcgccatgaagtagattggctcctcttccttccattcccagttcgaaggagcagaaagcttttgacgttttgccggaacctcttcatctgtatcgtcatcttctaactcgtcccacgatcttgtccctactggcacagttacgaccagcgcacgatcttgtgtttggtcaagcgattcaatccgcgaattgatgtccaaaggctcgttcgatgattcgtctaagttgacttgccaccaggttggggagaatgggtcgacgctcagtaaagacgacatcccgcatgttccttattgtgtttcttgcggccagcgggaccacatcggcaccggtgccctcgaacggcgcgcggctgctagctttcattagccgataccagaccatgggcacttccaccacaagaggattgtcttcatcgtcaccgtagccatccaaactgaagatcacgcccagaggcttctcgtcctcgccgttcgcgaacacttggaggtcagacggacggacacttggtggaagagaacgcttgcattcctcatacactgactgacggaaacctcgagtagcagctccaccagaaactattatctgcttaacctcactctggcatctagaccgtctagccccttcgaccaaccggtaatacttgctcagccccattatcgacttcttcagcaccacagatttcgtaatgcgagggactggccagttcaagcagtgattagatagattgatggtgcctcgcgagactactgggttcttgttccatcgctgcaacaaacctcgtcgctgcttattagtgtgaacgctgacaacgcagatacatttcatggcaattcgatattatcctcttaagagacttaccacgattcgagcgctatctcgtctcagagcctacagcttgctcatagggtttcttgcttggggcgcgatgcccgagtagagcgggtcgatgtgctgctcctcgacgtctgcgtctccgatgggctctccgtccgacacgaacagtgtgcccaccttctctccgttcaagatgcggagcagcactccctgctcagccttcgccacgaccgctgcccgcaccgccccactgtccactgcacggatgcacgagtgcagcttgtccttctgtccgatggcgcccacgcggctctcggctgcaaccagctgcttgtcgcccctgcggaacctcgagagcagcttgcggtcgtccttggagcccgtgtagatgccgtccacgtccgtgatgagcaccatgaggtccaccatcatctcctgggcaaacagcgcggccagcgagtcgttgtcccacgcgaccttgttctcgttgatgagcggcgtcgtgcgcctcgtgatgacgtcgttctcgttgatgacggggatgatgcccacgtccagcaacgcgcgcacggtgcgctgcaggttggcgcgcacctgcggctcccggaagtcggcgtcggacgccagcacctgcgagcaggccaggtggtactgggcgaagagcatctcgtagaggctctgcaggccgctctggcccgcggccgcgcacgccttctcgtagaactgcacgttgtcgtccacctggccgcccaggtgcgactgcatggagcccgtgagcaggtactggcggtgcagcaccatcttgccgatggacacggagccgctggacacgaggatgatgttgtgcccgcgcatgtgcagcgccgcgatctgctccacgatgttgccgatctgccccatggccagcagcccctcgggcgagtgcacgatctccgtgccgatcttgatgaggatcgtgcgcgcgcggcgcaggtcgcggccgaactcgcgtatctcgggggccatgccaggtacagcctgtagtacagggggggggctgctcgagcagctacgggttggggagtgggctcaaaggacatgcacagccagcgtgtgattggtcgtggaaatcacttgaagtttgtaagaagcctctggcgtctgcgacgtgtgagaaaggcaacaaccaaaagttgctggatgttgcctttctcacacgtcgcagacaagttgctctattcgtgcagcagtgccaagttagctgaaaaatgcgtcagcttttagacttgtagctgcggtctgagcgtgtgtgaggtcagtgggagaaccagctgacgttatacgaacaagggccttccttacaatcctgatgctagtgaacgcggcggtcaagctgcgttcgtcttctggtgggtcgtcattttggccgtccacgtcgtcacgtgcgtctacaacgcgctccactcgtactccctaccaccagacaatcgccgtcgtacacgccattatgtcggcggttcacggcgtttgcatcttgtccatgctcgggggctcgctctggcagcgttccttggccttcacgccgtggtcgtcttgtgccgcggattcggacaacgaagactcgaccaaagtgcgctcaaacaccgtcttcgagagcttgtcgaccatttacgaccgagtcacggccccatttgccgtggaaagcgactacttctacgccgtgctgatatgccgcgaagtcgttgagaccgcgttacagaccgcgcaagcccaccggatgagcatcttgctgccacgagtaatgctcaaccgcttctacttcgtgttgctggctgtcaattgcctgtcggcggtggttctccactcgctcttcttcaagaacaacgaggcccgaagaaggttcgcgtgcattgtactagactgtgcgctggacctcgtggcgtgcatgggcgtggagagcatgattcttaatggggagcaagtaggaacgctgttcatttcgccggacgggaagccgattggagacgccgccacggaggagcagcacatcgaccattgtactccggcattgccaaacaaactcgagacccgtttagcaaactgtagacagtggctacttgcgaggagagatagccaatcaaaggtggagatgctttaacctgagatcatcgcgatgactactacactaccacgaaatctctcactattaccagccggcccgtgtctagcagcacttattgtttgcagttcccctgcttttaggggtagtctgtcgagatactgacgttcgctggtcgagctgaatcggtgggagtgcgtccggtcgagtagttttgcttttatcggcgtcgtaaatggcgatcacgaggtcttcaaacgcttgacgcacgttgaagcaggtcttggccgatgcgcgctggtgcatgaggccaagtgatgtggcggctgtctcgtgctgctcctggtcgacgtagtttgtgtcgagcatcgcctgtggcgactccaagtccaccttgttgcccacaagcatgatgcagctggtcagggtgctactcagacccgctgcggccttcagctccttgagccagtgcgcttgggcgttttggaacgtctcgcggctggtcacatcgaatacgatgagcgcccccgcagctcgacggtagtgccttcatgacaataaaacgatgttagattctcagcctcacgcttgagctactgtcggattccgtacgagctggtgatcgcacgatagcgctcctgtccggctagcagtgcatcaattgaagataattagatcaaataccggtgcatgcattgaagactgggtgtacctgtgtcccagatctgcgccttgaggcgtttcccgttggggtggcgtacaatggcagtggcaaactctacaccgatggttggtttacgaacggcggagaatgagcgcgagactccgtcttcgttgacggcatctgccgcgaggaaggtggctagcagattggtcttcccgacgcccgggtctcccaccagcaccactgttcaacaccacaaaatggattcgagttagttagtcaagggcaaggattggtatcgcaggtcaatcgacacgtctggacctttgtacagctcgtcgtagtgctggtccatggtgatcgatgcagtacagctagggtggggtggggtggaggtgtcgagattgttgcctttttcgggccaaaccgttacgcggcaactgctcggaatagcaccaactgagcgagtattctccccagaccagcgatgccaacacttgctgcatcagaaagaaagtcgctggtgcttctccacgaattggagtttgtcgtgcatcgtcaccttctccaagtgctcgacgaggcccgagtcatggtctccggtgaatcttgaccgcgaaaccgatattctccatcgtgcgtgggtagtgccacctcggcggcagagtgttggaccagcagggctggcctcatgttcggcgtgaacgaagtcattagcgctgtcacgagctccgtgcgaatccattttgctgtcttcaatgtcgacgtcagaattgtaccgcttgtctggtaccgacggggcttgtggtggaacagtaccaagggatccgcgttaagtgcgtttttctgcgatcgtaccgtacattaacggttgaccccgcgacatgtgaaacgacagttgaagaggcttcaacaatagatctcacgtttaaagagcggtagcaaagaagttaaacgagctctggtctgcacaaagcttgccaatcttgagaatcattgacctctacacgacacacactaataccaatggaagtaaactctgtcactacgagatttcggcgacgtcagcagtctctggcgctgcttgctcttcaacagtctttttaggaagtgacttgtgttttgtattgcggagtcaaagatcgtgtcgaaacctgctcctgcgtcccgagtttcgattagagagcactacatctagtgggcgctggcagtgttggcaaaaaaaatatcgaaggatttatccgatttttacatttttatcgaacaaatcccgcttaatcgaataaaccgggagctgcagaggaaccgtagttgcgctaatagtagcggtatcctcgctgcagacaatcagagcacaggcgacatgtagcacagcgagcgcgggcggcttagcgtagacaacaagcagtagttgaggggcaagcggtcagcggcatcacagtgccaatgtacctcgagtctgttgctttgaggcgcgccgtttgcgttgttcgtccgtggcggaggcgagtctggggcgcaagtgctcgtgtctgacggcggcgcgagatccgtgagcagtggcacagagtcgctgatggggaaaccggtccggctggtgctgtcttgatcgggtctggcgctcatcaacacagtcgagcgggttggtcggcgtagctggcagcgaggcgtcaagtgctcacggatcggtgcgagtgtccggcgctcgcagctcgcacgacgtggctttggctgattgtgctggtgcgactggacagtacgaccggcgcggcgacgggcggcgtgtgaccttcgtcaggctcggcgtctggatctggcggtgctgctttggctggcagcatcagcttgtcggtggggttgtctgccgttgatggtggcgacgcgacattgccagcgggatgagtcaagtggcatcgtgttggtgggcggttcgacgctatcgacagcgtcttcgtctggatccgtctgtaggacagtagctctgctgttgagattgccagcggccatgccatcgtgtcagtgctcacgcttgcagtaaaggtgcccgaatagagaacccagtcttgtaatgaaagcggtttcgtctatacaaaaagaaggataacaaaaatcacacttatatgaataaaaatcgaaaaacaatatttttatggatttttataagcgataaaaatatttaaatcatttttgtgccaacactggcgctggtgatcacctggtaatgtgtattcatcactctttcgtgcggcttacgatgaatgcacacaaggagaccgccttggctatggaaccgtaaagcaggctagcggagcgtgcgcggccagccggagcaactcctgccaatcgccggctccggagcagccccagtcatgactccggccttgacgcgctccgctcacagggccagagcgcagcgtgagaggtgtcaatatggtaaagcgtgacgcaaggagcatttccgatgatccggcgaggggctcttgctgctgctcctctcttggccagccgttactgcggtctcctcgtattgtcaatttgtgccaagattgacgaacatttgcatcgcccgctggatcagctgtaatgcaacaccaaggattgctgttgcggttaacttagggcggcctctttgccctcgggtcctgttaaatctctcgattcgcgcagcagagcacagtatgccctgcagggctacctcggtgaagccaactgcgcctcaaatcgcgcgcacctgctcccaacgccagcaacccgcagcactgattacaagagctgcaaacggccatcgtcatgcgcgtctgcagaaagctcgaaagaaacgaagcgcccggcagcatgtggcggccagcggcagccgcgccttgccagccgagcggccagtgctctgcagccgaggacgcgtacaagtccaaagtgacgtctttgtgctgggcggacagaaatactcagcgtgttgcggcttttcctggacgatttgatgacattttgcgtcactgatcctgaaaagtcgcgcaatcttagccaatcagcgcgaccgaaagtgcgcctcttctcaaatctctgagatcgcgcgaaatttggagccaagcgaagcaccgtagtactgccaggatctcagcctggactggcttgataaaatccgcctcgtatagtccgcaagatgcattggcattgaggctcgccgcttgccttcaaggaaagtcgccccgcgcaggacgcgctgcttgggggcttgaaggcggcaggttctcgaaaccttccgcaccttggtttcacacttgaaaacgcaaagctgcacttggtttcactatgctcccgcttacgtccgacaaagacacgcgaacagccgcaataaaaaagaagccggccacgtctcgacctcaccctcaccttcgggcagtgcggagcccgcataaagcaaacggcaggctagcgctcacatcgaaactgcccgcgctcgcgctgcaagtcacgcccgccggccgcactcaattttgccacgctcgacgagctggttgataacctcagaccccgagcatacatcactccaccttgaagtggctgtcacaacttcagaaacctcagcgagcagctcccgaacaagattttttgtggtcgacacatcccgcctcagccatggtcacctcgacgtgcagctcgcggccgatccccaagtgcccgacgtccacttccgcgtccgcgtcgacgcgcccgcccatgcagcgcagccgcagcatcgacagcaacaagcccgtgctgcgccactgcgcgcgcggcctgagccacggcttccagatggacctcaagcaggccgtggagctcgagaagcaggagctcaagaagatggggctgctggcgcccccgcctctcatctccgtggaggcgccgctgcccaagaccgtcccgcaggacgaggacgaggacggcgtcgacggctcctactggttctatcgccagcagcgactcgtgcgtcgcgccgcgtcattcaccagcggccactgccccgcgcccatgccctgctcgccgcccgtgcccatcccgcagcaccacgaagcccagcgccgctacagcgccgccgggggcctgggcgaccacatgacccacggcgtggacgccgagcaacttcaacacctgagcaaatcccagtgcgaggcgcgactctgggacgagttctggaactacaagctgtcgttcgagtcgcgcgagtcgttcgaggcgcaaaacaactcgcacctgagcacgcgggcgcgcgccaacagcgaccagtcgacaggcgagcggggcctgctgctcaagtacagatccgagtcctccatggcctccacagccgacacagtgatcgaagacgaagaggacctggaaagcagcgtaggccccgaagaagaagaaggaggggaatacccacagcaacacgcagaccactacggtgacgtgttcgagatggacgacctatagtttgatgcaggcgaagcggactggatggaacgttatggatcaacaggacgaatcgacgagatagtgatagtttctaggtgtgaaagagtgaacgtaaagtttacgaaaggtatggaattaatatttgaacgcccccgtgcagtgtgaagtatcctagggcgatggcactgtaagtccccgagtcgcgtcttggagctgttgctggcgcagtttcagcgtcgcgaatcgattgcggcgcatgtcggcgacgacctgctccagtctcgtcgcgaggcggtggtgcgtgacttcggcgctcgtttcgtggttcttccagcgctggaaggccaggaactccttgccgtggcgccactggaacagcacactcctcagaactcgcgacggcggcctggcaacggcctccgcagatcctcgcgcatctaaccgcgcaacgtcacgccaatgctcgaaggccggttgaacggaagccaacgcgacaatcgcgctctccgttgaacgagacgaacccagggctctgatccgagctgcgtgctgctgctgctgcctgtgcactctgatcgctgtgtggcgcagccatcggcacacggcaacgtgggcaagctgcaccgggctgaccacgaaggcagacttctgacagagacaccgcggggagtgaaccatcgcaagctctgggcgtaaccaccacgggtagtccgtggacttggcccccgcatctcgtcgacgtgcgctcgtgtcgttcaaaccaacgcctttgtctgcatctcgttgcaacaaaccaccgccatcctcagcgtcttgcgatgcttcctcctcttccatcgtatagctcgagtctgtagtatactcgatttcggtggagctattccaggtcggcctgcagttatcgccatcttcacgatcagaacgcgcgctgattgtctctggatccaagggctgaccagcaacggcaaggccgttagcgtgaaggaggtcgtcatatcggatcgccgttattcgcctcagtacagcaacgtccaagcgtccgcgcgcgttttcgagtactgtttcctcatcttcgtcacccgaaacttcgtattggttccccgcttgatagtggcgggacgtttcgccatcgctgtcattgttgccttcgtcttctgagcttgagcgcgaacgtttccgtgctgaattctgcgcggcgatgtacgtgtcgtactggtctcgaagccacgaggggagcggcatcattccatggctggaggcttcatgaccgcaaaatccacacaacgacccattgttttgaaccagttcgtagcttttgcagccgcaagtcttgtagtccgcgtcgcagtgaaggaacgcgcgctctcgctttaacatcaatagctcacgtattatcaggcgcggtgcgaaggacggaaggaagtggagcacgtagtaaaaacaagcttggccttcgtactcggcctccagtcgacatttcaagttctgaatgaggaaacacgcgttgtctaagcagccggaggcgagtgcatacgatacggcagtgtttccaaatgcgtccagcgcgttcacgtcacagtcgcttctctcgagtaacattgtcatgatacggcaagcgaggagcgtattcgagaagcaagctgcgcgatgcaggagcggtgtacccattccgtcgccactcaagcgtccgggattgaagtggttctccagaagcaacaaagtcatcttggcgtacacgtcacctggatgtttagctgcaatatagatgcactcgacactttctgcgtctgtcaagtgtttcgtggcggggcaagtggcttccagaatccacgtcaaagcctctagtgaagcatttttgatggccgtgacgatcaatgtatgcacggatgaatctggatcggaagatcgagaacgcgttagtgtcatcgcttgcaagtgcgacacctgattcagcgccaccgcggacaccaagtcgtccttacgatttaaccaccgccggtagctactcaaggtatttccctgcgttgcgtgttgggccattcgtttttcgttgatgtcgaggatacttcgaagtacaccgacttgccactgtacagtcgactcctcctctgtatcactgtctgctgcaggcttcgactcgtcggaccccacttcgtcggtgtcaactttgttcttcgcagacgagttactcgcttgaagcactctggtagatagcaggctgaattggtggttatgacccagcagtctgcatagctccagtggagtgcattcatctaattcgtgtcgctcctcgatttggttgatgaagatctggcgccagttgacagagtttttccctgcttcatcgcttgaacatcggccagacaggaagtattcacctactcgagtagcaccccgacgcgctataacgtggaggatatgggagtctttcaatacacgcgtgatatcttccgcgtcgtttgcatcgccatttgaaccgatcatcgccctcactatccgcgctgtaagctcgacacagtcattcggaatcgcgtgttttatcatcaaacttacgagcagattcgttcgttcgcttatgctgagatgaagctgaaccagttcctgataagctgagaataatttatccgagagacagggggaaactttgtccccttcttcacaggcggagaagctggttaccgaggcagcgacaaagtgactccagtaagagccgcgctccagtccttcaggaattgtagccagtagccactccatgatgtcgacacgagcgtgcaaaacaatccactgcagcattgtctttcctcccacgcgcatggttttcatcgcttctagtgcggcaccgtccggaaacacaatggcgaagcagcttttaatgagctcgagaggcaagttgttggcacacatgtgcactaatgctcgaaccgaagctacgtcatctgacggtggtcggcctggatccgttgtgctagacttggttgttaacagcttttcagtgcagattgttatgaactcgcgctggtggcagggtattgagcgttctggatttcctcgagcgccaattgctgacgcgtagagctcgaatacagtgtccaacaaacggcggcggccacctagtcgattcagcgtctcaagaagaaccaaagcgcactcaaagtatccaagcaaaattgtagattgcagccaagctgcagccttgcacttcagacgctcgctgctaacctcagagattttccagtgcttgaacaaaatccgaatacaagggagcagaatacgttcgcactcgtcgggtgacattactggtgcatcgtctcctcgagggatacgtagaaaaatccgttgctgaagatagtggtcaaagcaatactcaagaagctcgtgcacttcaacgcccccatcttcaatgactaagacccatccgtacaaagtccttatgtgctcgatgccgattgatctctcttctccaggtttccttcttcgatttctccaagatagtaaactttcgtggacgcatttccatggcgagcctcttgacaagcacacgagattgttatccttggccgccgctgaatccctttcagacgtacgagttcgtgtcatctgtggccacagcttcagcaattctcccaacgtgcggaaatacttccgaacaaacagcatcgccaagaactcacaactactggcgacacgatcaagctcaagcagtagcgacaatgctgcctccacctgctttgcgtcaatcgaacgttgtgaagagcaccatcggtcaatgtcagcgatatcaatctgttcggctccgtgctggagcagcatcgcaagtatttgagggtatcgagggaaaacacgaaggccttctgtaagcgctgaaagagtgttcgggcttacgcgcgctgtcctcccggtagcatccttatcatcgcattcattgctcgccagttcatcaggactcgcaccattcattagaagtagctcaacgattgccactcgatggtccgataacgaacgacatttccacttcagcgcacaaactcgtacggcaagtaataatggcgacaataactggaattgattggcatttctagtcgatttagaagttcccccgctcccctcggcgatgggcttgcagtggccgcaacttccaccatattttcggcatcctaactcgtcgtcgctgagcaccgcttcgtcaccttcagccgcccctgttttcaatacaatcgttttctcctcagatattgaggctcgccgttgtcgtgtccaataccacaatgtttcaactgggtgttgaacgctatcccagtcaggcgcatcctttttgcagagtgcgctactgccatcagcagacgcagaaatcggcataactttctgcgaacttcgtactcgctgtcgctgaaagacaataccacacggagcccatgctgctttctcgggatactcttcgcggcgcggtggataactgctaggagaagtcccatatacaatagccccaaggcttataaattgctgaatcaactcgaaatttccccgccagacagcgagatgtagtggagatacaccgtcactgtcatgaatgtgtaatgcggccggacatgttcccgataagagcacaccaatttccactcgagccagtaaatcaccggagccaagtagacaccaatgcaacgcggttcttcctcgaacatcttgaataagcgcgagttgctccgcagaatcattcgactcaacgctctgctcaacgcaatcactctgtgatttcccaagaagcaaccggcagacatcaaggaagcctcgtcgtgctgcacaatgcagcgccgtacatcccgaagcatcctgagctagcacgggcatgttcattgtggacagtaaaaaattcacaacctgcaattgctgattctcacacgcctcgtgcagcatcgttcgcttcaactcactcagttcccattcttccgtcgagcagccgtagactgtaacgatcatttccagccgctccacgtctccagatcgacaggcgtcccacgcgtcacctcggcagcgcatatccaacgtcttaagactctcgttatccccccaaccaagtgaccgatctccctccaacactctgcgactaaacatctccagcattcggtccgccagctcccacagtcgtcggtaccgcttgctctccgctctcatctccacagtcaccaacgctggaactctcaactctcctcgtcgatgcaacgccaacaactccattttctccagtgcatagtggagagcagtgcggcctgaattgtcccgaacgtgaacttgcaacttggcatctcgccgtcgcagtagcttcttggcaatcttcacgtggtcggttatgactgcgtggtgcaacgcaattctgccagttgtatcccgttccaatacacaaactccaggaaaattcaaaagacctcgaagtttttctcgatcaccgctaacgcacgcttcgtgcaggcttgggaaggtttggcggcgctcgaagaccaacttccgacgttgaagtttgtcggaaatgtagccattttgaaatacttgccaaggccgctggtcgctgatgataaagagacgatcggtagacacgtcttgacgctgctgcagagcgaggaatcgcctcttgcgacgctggtaggcacgctcgaagcgctcgcattccaccgggaaggtgtccgatgcggccattcgcatcaaatggctacagccgtacttagcgtccaaccccgaacttaagggtcaaaaagagacagttggcgagcacaagctcccggcgacttccagagcatttttctgctgcttcccatccgtccacttcctgcaagagcgtaagagcccaagagccttgaagtgacgatggccgtggcgcgccaccacttgaccatccaggagaagaaccagctgcgcgccttccaccgcgcgcggccggagctgacgcaggagcagctgcgcgagtgggcgcacgtgcagttcggcaagtggatcggccgctccaccatcggcaagatcgccagcatgcccgaggaggtgtgcgccaacccgagcgccaagcgcgtgcagagcggccgctatccggagatggagcaggagctgtacgagtacgtgctggccaggcagagcgacgagcagccgctgcgcgacgacgcgccgctgctgagcgagggtctgctctggaccaaggccaacgacatcctcaagcgcacgcgcggaccgggtcagtccgtgtcgctagggtgggtacagaggttcaaaaagcgccacgggctgcaccgctcgcagaggcgcgtgcaggcgggcgatagtacagaggagacttcgagagcagtggtgacggagctcgggttagagcccgcggtcattgtgacacctacagttgtggaggcagatgaggctgtggggattgttggacaaggtgacgatgaggtggagattgctgctgtgggtgggaaacgttctagagaggaggcggtgaatgatgaggacacggaggacgagttgtcgttgatccctccgccgtcgaagaagagcacggcgacccatagagctggtaccaggaagcagtttgtgtcggcggacgacattcttctgctcacgcaggtactcgagacgaagccgtgggcgtatccgcacgtgatggacggctggcaggaggtgtgcgaccgactccgtggacacagcgagtttcatctggacaagacggcgggagcttgtcaggctcgtgtggcgctgctgctggaccacttgaaagcggggaacattgctgcgctgcggaagtctgggacgtcggaggagtacgagcgcaagcgcgagctactaacggatgtgcaggccaagctgacggcgttcgaggagtttcaagaggacctgcgcaagcggagaggcgagccgtctccgccgcccagtgtcacgcagcacgatgctgctgtggctaaagtgggtgaggttgccgcggctatcgccgtagcggaggcaacaggcgaggcagacctggatgggcagcgccgacttgagttactggagatcaggatggagcgagagctcgcagagcagcggcgacatgccgacgagcaagttcgggagcttgagaggctgcaacgagcacagctagaagctcagcagaatcagcacgctcaacttttggcaaccatccagcagcagcaggccatgatgctggatctcattaaatcggtcgctgctcagtccaagagcaaggattagaatttatcggtgtattacctacatatggtgtactatcagtcagcaaaattctgcaaaactgcttggtgtatcactctgccaagctaccagcacgatcagctgatacatcgatccaaactccgggtgtgaacggattcggcaaccgaatgcgcttcgcgtgcaggtaaagtcggtcggctgggcgtccgccgtatttgtcatctccaacgatcggtgcaccgagctcctgagcacaatgcagccggagctggtgtttccgccctgtacgcggctgaagctgcaaccacgtgcccaagggctcaccacgctcgttttgccgcagcacccgttccactaatgtacaagccgccttgccgtcgaccggcagattgacttctcgcccctcgaacgtcttcaaagttgaaaaattgtctcgtggatttactgcagtggacgacgacaccagcgcttcgtacgtcttgtgcacgtccccactccgcagcatctctgagaacttggctgctgccagtcgggagcgcgccagcaccagcacgccagacgtttccttatccagtcggtgaaccagcctcagttcctgctcgtcggtttgcttatgagtgcatcctccttccaacctctcagctatccacggcaagtaccgtgccagcgactccgtcaatgccgagccatcctgcaacaatggatcgtagagcagccacacaatcagtaccaattcacaacgaatatctctaatgccgcccacctgcactgcaagtccgtgaggtttgttgagcaccacgaactgttcgtcgcggaacacgatgcgctgcatcaagtgctgcagctttttccggtccctcgccgtcggtggagagaaatgttgcccattgattcgcttttgttgctctgcaattgtctgtaacttggactgaaagagatacgcatcgatagccaccacggagccctcgaacagcaacgagttggctcgagttggcgctggatcagtcacgcccggcggaggctgcagccggatcttgcgcttgcgcagctgcgtctgcagaaagctctgcggcagcgacggaaactggcgccgcagccagcggtccagacgctgatcttggtcctgcgcgcgcaccacgtgccgcatccagcgcagctcccggcgccacatacgtccgagcttggtttggtcgtctacagagatggctgccgtcacagcagttggggagcaattgattacatgcacttgcagagcactctctcttcatttgaagagcagctttcagaagaagccccgtcgctgtacccaatgcgctgcaagagcaagagctccgatgctcttctgctctgcatccgtggcagaacagcatagcggcgcgttttgcctgccaatctgccggcatgtcggcttcgcgagcgagacaccacctgaccatcgccgacaagaaccggctgcggcgccaccaccgcgagcacccggagctgacgcaggagcagctgcgcgagtgggcgtatgcggcgttcgggcagtgggtggcgcgctccaccgtgggccacatcgtgcgcgcgcccgaggaggtgtgcgccaacccggaggccacgcgcttccagagcggccgctacccggacatggagcaggagctgtacgcgctgatcgcggcgcgcggcgcgcagctgggcgtggacatcaagcggctggacgcgcccgtgctgagcgactcggagctctgggccaaggccaacgagatcctcaagcgcacgcgcggcagccacgagggcgtgtcggtggcctgggtgcaccgcttcaagaagaggcacgggctgcaccgctcgcagttgaagagggcggccggcagtgccggtattgctccaaatactgaaactaccgtcacaataaatactcgtgtaagttctgccggtgtagcgccgacagtgccggcggtgccggtgggaatggagacgcccgagctgacagtggcagagcagacgctggaggcggtgcacccgtcggcaggagacaagcggagtgcggccgacgctgcagtcggagtggagctggacgggctggggccgacgacggagccgccaaacaagcggccagctactgctaccacagctactgctgctgctgctgccactgctgcctctgcagagtccgttgccgccgctgctgccggtaaccggtcacactttgtgtcgtcggaggatatcctgctgctgacgcgggtgctggccgtcaagccgtggacgttcccgtacgcgatggacgggtggcagcaggtggtggagaagctgcgcggggacggcaacttccggctggagaagacggcgggcgcgtgccaggccagagtgaacctgctgctgggccacatgaaggcgggcaacacggcggcgctgcgcaagtcgggcacggaggacgagttcgaccgcaagtgcgcgttgctcagcgaggtgtcgtctcagatggagtcgcatggaggaggaggggtgcaaacagctgagaacgcttcgtcggtctcagcggtggcagcagcacccgtggcggtacaggacgcggtcagcagtgtcgagatccccaacctggctcaggagcgcgagcgaatggctcaacgccggctggagctgatggagcgcaagttagagcgggaactggccgcccagaagcgccactcggaggagcaggttagtcgactggagaaacttcatcacgaacagcaaaagatccagcaggagcagcacacgcagcttcttgctacgatccagcagcagcaggcgatgatgttcgagctgatcaagtcgttagctccagcccctgctccaacgagcaggcagtcgcagtcgctgtaaagagtggcttgctgctcctcttgttatgttcctagaagagctccgaaatgaatgatgctgtgcatatattagtgcatgacacctctacttagtcgagtcggccgacttcaacttggcctggtggtccgagcgaccacgcttgacgcactcctggaatcggcgcttgaggagcttgtcatcaggagcaagctgcatggcagaccacatagcgcaagcggcctcttcgtacagtccaagcgcctccaggcactggccctcgcggaacagagccttcggccagtccggacgcagcttcttggagacacgcacgtcgtgcagggcctgcttggcgtcgcccgcacccaggtgggccgcgcagcggttgctgtacagcaccgcgtcggcaggcatgatctcaatcgccttcgtgtacagatccacagccagcgcgtagtccttcaccaggtacgccttgttgccctcgttcttgaggttggtggcctccgtctttttctcctcgctcacctcgacggcctcaggcacagcgatgtcctcctccttctcaatctcagccaacttcttctggttctcggcctccagcttctcctccaccgtctggggctcgttcgctccagctggggcagccggggccttgttcttggcagcctcctcgtagtaagcgtccagcttcaccttctcctcagccatcagcttgttcaggtccgcgtcctcaaagcccttggtgaaaggcttcagcagcgtgacgatctcgtggtggcccatgccagcagcgagctgcagaggggtggcaccagcatccgaagccaagttggccacctccttcgtgtcctccagacggcagtttaggaactcctgcaccacctcggtgaagccggtctcagccgccatgtgcagcgccgtgagcccaccctccatggtgagcgacagcgtcgcgccgccttccagcagctccttgaccaccacgggcttgttcatcagacacgccagcatgagcggagtcactcctccggcgttggtcacgtcagccttggcgccaagacgcagcagctccgccaccgtcttctcgcggtcctcgctcacggcgaagtgcagcgctgtgccgttcttcgtagtggcctccagctgcgccttcatctccaccagcagcttcaccgttcggatgctgccgttggccgcggcctcgtgcagcgcagtcgtgccgttgttcatggccgtgttagggtccgcgaagtacgcgagcagcagcttcacggccgcgaactcgttctccttggtcgcgtacagcagcggcgtggcgccctcctcgtccacgcactccacgcactccggggcgcggtcaaggatgaagctgatgactttgcggcgtcccttggccgcggcgaagtgcagcgccgtgcgcttgtgcgcgtccttgaagtccgtcagcgcctccttcacgtccgtgacgcccatgacctgcagggactcgagcgtcttctccagctgctccaggtcgccatctagtcattagagagagttagagttgatacagaagcgatttagccgagaattagacgagaagtacgcactttcggcgctggagagcaggtcgcccacgaccttcttctgcttctggtactcggaggcgccctcctccttcttcttggcgagctgctccgccgtgttcgccgccatcgtccgcttggtgatacctgctgcttgttgccagtcaaagtgatggcaacggttggggccaataaaatagcacctatctaagagaattgtatgatcgatgagaggtatacaacttcaacgtatcaagccaatcgcctgcgtgtccgtagcaaagttggtattacagcttgaagctagcagtatgagacctgcgttttgttcttttctgtggacgtgtcgctccaacagaagcccatttacaatgctgcgtttgaagacggatcgcatcctttgtggctttctcagtgtcgattccgccgccttcagatcaattgccacgatgtcgacggtcgacggcgagccccgcgcggtgatgattcccattgtacgcattcattgtgcgggctgtgctcgctacacatgagttgatagttttcattaatttgctactttatcgctttgcaggccgacggaacggaggagatcgaagctatcgcagtggcagatgtgctcacacgcggcgggatgaaggtgacgctcgctagcgtcgggcgcaagctgcagaacattgtgactatgtcgcaaggcacgaaagtgcaaggcgatatcgccatcgaggcctgcgttgacctcagctttgaccttatcatgtgcccaggagtaagtgcaggagtgctgtcgtcccgaagtgctggggctaccgacactactgttatctttgaacgttattatccagggacctggcgcgcagcacctgcacgactcgccagagctcataacgatgcttcagaagcagaagaaccaaggtcgatactatggcggcatttgcgcggcacccgcggttgtgctcctcccccacgaattgctcgacgacggccccgccacgacctaccccagttacgagtccaagatgaccggcgtggacttacgcaccgaagagcgcgtggtagtgaacggcaagtgcgtgaccagccaaggccctggaactgctatcgaaatgggcctgaaacttgttgagctgctctgtagcgaggagaaggcgaagagtgtggcccaagcactggttgtgtaaggccgtgatgagcgtggggtgaatctgctcgttgagctggagggctgaagacaaatgcagtgatgaagcaaggataccaaattcaaacagcaaataacttttgacattgaaatatgatccactggttttgccttccaatgcaaatgcgacgcaagtgtgcctcagaggacacgccgcaatcacacgcaaaactactgcaagccaagcttgctagcttcagacggtattggacgctggagctaacgacttgatcagctcgaaaatcatcgcctgctgctgctggatcgtagcaagaagctgcgcgtgctgctcctgctggatcttttgctgttcgtgatgaagtttctccagtcgactaacctgctcctccgagtggcgcttctgggcggccagttcccgctctaacttgcgctccatcagctccagccggcgttgagccattcgctcgcgctcctgagccaggttggggatctcgacactgctgaccgcgtcctgtaccgccacgggtgctgctgccaccgctgagaccgacgaagcgttctcagctgtttgcacccctcctcctccatgcgactccatctgagacgacacctcgctgagcaacgcgcacttgcggtcgaactcgtcctccgtgcccgacttgcgcagcgccgccgtgttgcccgccttcatgtggcccagcagcaggttcactctggcctggcacgcgcccgccgtcttctccagccggaagttgccgtccccgcgcagcttctccaccacctgctgccacccgtccatcgcgtacgggaacgtccacggcttgacggccagcacccgcgtcagcagcaggatatcctccgacgacacaaagtgtgaccggttaccggcagcagcggcggcaacggactctgcagaggcagcagtggcagcagcagcagcagtagctgtggtagcagtagctggccgcttgtttggcggctccgtcgtcggccccagcccgtccagctccactccgactgcagcgtcggccgcactccgcttgtctcctgccgacgggtgcaccgcctccagcgtctgctctgccactgtcagctcgggcgtctccattcccaccggcaccgccggcactgtcggcgctacaccggcagaacttacacgagtatttattgtgacggtagtttcagtatttggagcaataccggcactgccggccgccctcttcaactgcgagcggtgcagcccgtgcctcttcttgaagcggtgcacccaggccaccgacacgccctcgtggctgccgcgcgtgcgcttgaggatctcgttggccttggcccagagctccgagtcgctcagcacgggcgcgtccagccgcttgatgtccacgcccagctgcgcgccgcgcgccgcgatcagcgcgtacagctcctgctccatgtccgggtagcggccgctctggaagcgcgtggcctccgggttggcgcacacctcctcgggcgcgcgcacgatgtggcccacggtggagcgcgccacccactgcccgaacgccgcatacgcccactcgcgcagctgctcctgcgtcagctccgggtgctcgcggtggtggcgccgcagccggttcttgtcggcgatggtcaggtggtgtctcgctcgcgaagccgacatgtcggcagattggcaggcaaaacgcgccgctatgctgttctgccacggatgcagagcagaagagcatcggagctcttgctcttgcagcgcattgggtacagcgacgggcttcttctgaaagctgctcttcaaatgaagagagagtgctctgcaagtgcatgtaatcaattactccgcaagtgctggaagtgcagccatctctgtcgacagcaatggcgcagtacactccgccggagtggagcgcctcgggccgcaacgagttcggcatctacctggaggtgatcaagggcggtgtggtggtggacacgctgccactgccgcgcaccgatgggcggagctacgtcgtggccgggcgcatgaagaccgtgtgcgacctgcccctggcgcatccgtccatctcgcgggtgcacgcggcgctgcagttcgacgacaagggcgccctcttcctcttcgacgcgcgtagcacgcacggatgcttcgtgaacaagaagcgcgtggtggccgagcagttcgtgcggctgcacattggggacgtgctggtgtttggcgagtccacgaggctgtacgcggtgtgcggacccccggagctgctgccggccgagtacgagtcgctaaatctggccaagttcagggagaagctggacaggaagcggcagattctggagaagaagaagcaggaggaccgaggcgcgtcctgggggttcggagaagacgcacaggaggaggagggggacgacgagagcgacgaagaggacgcggccaagggcaaagaggagctgccggactacctccgcaatgtaaggaggtagaacgggggagaatggaggtggtggtatactaactatgtggtgtggttctcagttgaaggaggaggaggaccagccctacaagtcgagtgtgagtcagtcgcaggtgaacgagaaggaccagcgcctgtaccagcagctgcagacgcggatccgcaagatggagaacctgaagctggagcgctcgaggattctggccaagcagaaccagctcgacgggctgtcggaaggccagcagcgcacgctggatcggaacgagcagcgcattgatgcgctgatgaaggagatcgacgacctggaaggcagaattcacgccaagaacgaccaacggtccaagacgggcgggacatctactactgcgaggaagaagcgcaatatcaacgaggaactttacggctacagcagtgacgaagacgatttctacgaccggactaaggctaatcagcagaagattgccgcgcggaagcagagggttacaggttcatcgtcggtagcttccgaggcggtggcagtgacgccagcagcgcgggttcagaagagcgaggtgctgaccgccgactcaattcaggccaatgtcaagaagcttgaagccgaactggcgaaacttcagtccgaattgactgctgcgtccgcaaaggccgctgcgaaccaagctgtaggtggcgagagcaaagtggaggaagaggaagcggattcgttggactttttcatggtcgcaacaaccacgcagctgcatgcgagcgaggttgacacgctcacgaagcttaaggcagaggtggaggcggagctcaagcgtcagcgccaattgcttgtcgtcgcaaccccagcgctagctgctttgcctgttcagaagccggcggcgatggccaagtcggcgccagaacctgctgcgaccccttcctcgccatccaaacaagttcccactgcgtctacatccgacaaactgaaggtgcctgagcctgttgttgctgaagctgcagtgatcgagaagcaggaatcggtgcctgagcggaagacatcttcacaagagagagcacacaagcagaaagcacgctctgcacctgcagccgcagcccaaaagacctccgaccaagctccgatcgagtcatcagcgccaaagcgacgacgaatcgctggtccagcaatgggtcctccgagagagacgaagcctagtactacaagtgccgacgatgcgagtgtgttggaaggaggcgatcaggtgtgggtgccgccggcaaaccaaacaggcgatggccgtacaaagctcaacgacaagttcgggtactgagtccaattgagatggcaaagttttgtttgtttactccattcattattagtttgtattgtactggagtcttttaccagtctccgcggtatctagcgctgccttgcagctgctcttctccttgctgggcggccatcgtgttgaaaatgtgctcgagcgaagtctcgctcacgccgtactcgctgatgagcagctgctccttgttctcctcgagcagcccgaagatggcgtacggccgaagtgcgcgcttgggaacttggaagcggaaatggccgccctggtgctcgatgagctggctgcctgggaacttgacctggaagaactcttgcaacgctgatcccatgttctccgtgagccaccacgcacagaagacgtccatggggactaaacctgaggtctcaaggtagctgttaagcacgctgccgttgcccacgccgttcaggatcgcatgcgcgcggttgggcgctccgagagatgaacacaggctagtgacgtcgaccgctgatacgcctgctttgttgccgcccaggatacgatacacctcgagctgcagtcttccaatcgaggacgggctcggctcccgcagtttcacctccacaatgtagcctcggccgaacttctgcttcaggtgctccacactgccgaggcatttcagctttccgctcaccaagatccccacacgcgtgcacagcgcctcgcattcctccattgagtgagtcgtaaggaccacgcacgattcctttgcggcgcagacactggcgatcacatcccacattttccttcgcgagctcgggtccactccggtcgagggttcatccaggaagatgatgctgggagagccgatcaacgcgatcgcggtcgagagtttacgcttgttacctccactcagcccacgtgtcagtttagtggggtactcagtgagccccacttcctcgatcttctggtccaccgccttcttgacacgatcgctcgggattcccttcagccgcgcatacagctccagttgctcttccacagtcagcaggtcgtgcaacgaatcgaactgcgggcagtagccaaccacgcgacgtgctttatcacgatcacgagacaagtcgtagcctcccagcgtcacgaacccgttggtcggagcaatctcgccggttaagactttcatcgtcgtcgacttgccggctccattgatacccaggtagccaaaacattctcccttctgaatggaaaggcacaagtcgtccaatgcaaccttgcctccatttccgtattgctggcgcaggttgcggataaacacgctgtcgttgtcggtggggtacgagcgctccactttttggcgctctttcgccacgtcgtcgtcctcgttgcgcggccactgctggcgttgctctgggcgccaggacaaactgcggttctccactacgaagaccagcagcatgaagaccacgatctccaccactgcgtaggcgacaggagctccagcgacatcgagatcgaacacgttgcgcacgcagcagttctcgccactcgcagcatcccagcatgaggtgcacgtgtaatccgtaccaagtccagcccaggcaccgaagaacgagggcggcgcaaccgtctcagtgctgctaccgtacagcgagctacggctcaacttccgcgtagcaatctcataaataccattgttcaggctgtagccggggaagagcaggaagatccaacgaaggtagttccggtcgagcgaggacagcgtcaagttgtcggaggaattgcccggagtcaagtcgaagtcgatgagtcgacacaggaacgagaagatgctcagcaaaccgccggtacacagcgcaaacacgagcaacgacgtctgcgccaccgcgtgcttcttgaacttaaagctgaacaagtacgccatcgggatcactgccaacgcgtgcgagccgaccaggcagacaactccccacacctccatggaacttgtcagcgtacgatccgataacggcaccatgaccatggcagcgataactgtgaccatcatgaggacgatatcatgcgtccacgtggacagccagtaagctgacacgttggcaccgcagatcagttgcaaacccttggcgttctggatgggattcttctctcggaccacgaatgccacaatggcagctggaacaaaggcaaacgccagcatcaccacaaccgacgtcaagaaggcgttcagcgtggcctgaagcttcgcgccatcctggtcaaggcagtacttgttgtagcacggagtcactgggttggacgatgaggtgccgtcgcacatgttgcacgcgtagtaaggagattcaacgttagtcttgtcacaacaagtcgaggcgctgcaatcgatcacgccgaggtcgcagtagttgaaagtgtagctgtcgcacgcactcggaacggagaccagcgagaagttggcacttgagcacctgccctgtcgggacgacgaagccagttccgtagcgtagtcattcgtcgtcatgaaactggccacgtcgatctcagggagcgaaaccaggataatcaagaagagcagcgggatacagacagcgttcaggaggttcttcttgtctctctttgcgatcctcacacgctttgtcagaagcgcggtgtactggctccataacgttgcacggtttgtcgcttcagctgcgatagcgcccgtgaaggtgccccgggaattcgccgaagtagccgacgtcttacggatttggtccaccgcctccactccacaggcagcgactcccatttcagcctcttcttcgcggtcatgtgaaatgcgcaagaatacttcctccaatgtcgtcacggacacaccatactggacgacgcgcaagcgacgcatttcatcatcaagcacctgaagcatcgtcgagaatactcccgacgacttggatgggagctggaacacgacctccgaaccaaagttgctcaagcacttcgcttcaggaacgaagttgcgcaagaacgcaccgacagcttcgacatcacattcaggcgcctttatcatggtcaagctgtacccggcgccatagcggtttttcaagaagagcgagcttccagcacaacagagctggccatctgccatgatggcgatccggtcacccagaatgtcggcctcgtccataaagtgcgtcgtcagaacgatgacacggtcgtcgcggttccgctgcagcaagttccacgtgaaacgacgagagtaagggtccattccggacgtgggttcgtccaggaagaccagcttgctgtctcccatgaacgccaacgcaacgctaagcttccgcttctgaccgccagagaggttcctagcggcgaccttcctcttctccaccaggcccacttccttaatcattcgctccacttcttccttcagagtgcaatccggaatgtgcttcatcgttccaaacatcagcaaatgctcttccacggtcaactcgttgaagagaacgtcgtgctgggggcaaatgcccatgatctggcgaagctcgttgaagtcttctcggacagagcggccgtagagcgccgcatcacccgacgtgggcgggatcagccccgtcagcattgaaattgtggtcgtctttcctgcaccattgtggcccaacagcgcggagatctgtccagcgtaaagcgtaaggttcaagccttgaaccacgaccttcttcgcgtcgtctgacgggaactccttgcgaagaccgcggatctggaggcacgttcccttttgttcctgagctgcaagcgtagcattaacaggctccacggacgccacgagtccaggccggtccttcatcatgacgaccgatccatccgaagaggcctggtgcaggagccgcatgccgcgtggtgacccaaacgaatagttggtctgaggcgatgaggccgtactaggagactccagcaccatcacttccttgtcgctattggccgcgcttgaaggcatccaatactccttcacgaacaggaaattccacggcttccgcacgccaaattcttgcggtaaaacgttgtcaaaataccagccgagagcgaccagaatgaacgagtcgaggatcaagaaccagctcatcgcaaacgccgaggggaccgtaataggcgactcaatgaggcccatggcatacgccaagcctcttccgagctgcgcgcgtcgcaccaagtcgtcgatacccagtgcaaacgccgtcggaggagcgagcgctcctagatacttggacgagttagacttggacatgacagagaagaatgggaagaacagtaccaaccacagcagcacagaggcgatggacgccgcgcgcgacttgttgaagaagggcgtgatgaagtagctgaagctcacgatcgacaggctcagcgcccagaacaggaacaccagcgtcgcgtactccgtcatggggaagacctggccatacttgagctctgcggcgatcacaaacgccagtggtgtagccaagatggccgtggtcaggcaccacgagctcagcagcgtgaagttggacagccccatgatcttcatgacctcgcggattctcgtctccttctcgatcaccatggtcgtcgtggtcgtggacacgaacttgatgtagctgatgagcaggaagagcccgatcacgctctggccgctgctgtagaaggtcgacatgttggtgctcagcgccccgtagtccgtgtacgccagcgagtccagccccgtgcacaagatggtgcccaacagcgtggccgcctcgtacgagctgctgtagttgtcccccgtcccgaagatcgtgtccaggttggcgatgaacacgagcgcgagcgtcagcacgggcggcagcagcagctcgaacacgaaggacacgggcttgcgccgcctgatgacgaggttcttccagatgaggttggtcacctgtctccaggccgcgagcgccgctgtccacgtggctctgccggccgcagcgaacctggactcgaccgcgtcgccctctgctagagccgcagccccctgtctcctggcgtgtatcctggttgcgaccatcacggccgcgaagaaggcgaagatgacggcgacgcacacgatgagcgccgtgttctgcgccgagaggccgcactgctggctgtcggccaccgtggcctcgatcaccgacttgcagtacgcgatgctggacgacgactgcgggcagctgagcaccgtgctggccgccgagcagcacgagctggacgccgccatggccggcttgctgcacatgaggctgcacgagccggactcgtccacggtcgtggagccgctggcgctggcgctggcgagcgcggcggcgatggccgtggccgtggacgtggcggccccgaagggcgaggagtccacctcgaagaagcctgagttcatgacgcagagcgcgtagtcgtagtcgtacgcgacgatggtggacaggcacgtggtcaacagctccgtgccatcggacgaggaggacgaagaggaggagccggacgtggatgtggaggacgtcagcagcgacgcagcggacgaggcggtcgacgaagaggaggaggacgttacagtcgttgtgcctgttgtcgctgtggttgaaggcgccgtcgtcgtccgggaggagaccgttgtggacgagggtccgccgctgggcatcatggtggcggagtggcttgccccggcgtctgcggtagacgactaatgctagacgtgcggcggattcaagagtgccagcagcaggagctgaggatggccagcgccggcacccatctgtgtcctacgactgggtttcgccacgcgacatggattattcccaagttataaactaatacccccatacgccgatatatctacatagctctatctgtacgattgataagtattttcccctttgtagtatgataccctgataatcaaaatggcttcatacttgtactttgtgaggtaattttcagtgtttgcatttttgcaattgcggagtccagttttcgtgaaagctattcgcttttcgatgcttgcaggctacaaaagcgttggctacaagttgtagccaaaggttttgatatccgccccgaagtctatcactgacggcaactgggctgcaagcgcttctgtttcctgaatagttgagtgagatgtggcgcgctttccagtaggaagcgctctcgccgcccaaaacgcttgcgatgcagtatcaggcttgtcaacggcgccaagttgtcgattttcgataacgaacctttgagtagcacgtagtttttgaactgaagagttccctcaggatgccgaagtaggtacagatgtccacgtccagaagctacatgtgagagtagagctaccgatgagaagcgcgcgtcgcattatcgataatagattgcacttggtgcacttgcaatgccttgatgtgctgtccgtgcacctaccatccagcatgtgcggttgatgttattctcttcagcaagtccatattcgcgtccaaatggctccaccacctcggcatgccgccgattctcgtgcgtccaagagcatgctgcagcggtacgatccccattttaatactctctccacgttatccagtgtctcctctatctatccatacctttatatctcccaaagaccccgtaactcacgagaaacccaactactgaatattacagccatcaagagctcatgagagtttactcgtcctccacgcgccgcagcaacagcgtcagcagcgaggcgagctccatcgcagcccgcaaagaccatggaatatcgcagaacgacctggcagtgctgaagcagcagttccagtttatccgcgatgacgaggccgacgccgagcagggcgagacggactggcaggtccgcatgagcgcgcgctactaccgacagctcttccgggagtacgcgctggcagatctgtccaggtacaaggagggcaagatcgggctgcggtggcgcacggagatggaggtcgtggcgggcaaagggcagttttcctgcgggaacaagcgctgcgacgagcgggcggggctgcacagctacgagctactgttcgcatacgtggaggacggcgaacgcaagcgctgcttagtcaaagtgcgtacctgcagagcttgtgccgagaagctgttttataagaagttgatggaggtgaggaggaggcggcagcggaggagggagaagagggaccggaacagaaggcgaattgaacaaggctcgggtggaaagcaaaaggcgaagcgaaggagacgctcagtctcaggctccgagtctggtagcggcagtgagagcgatgccgatgtggaggagaacgacagtgatgagcctagagaggatatccacgagctgtgtgcgaagatcagcgctaagcaaaaagctgcgtatcctgccgatacacggaagcaaagctcgggtaagcgagggttcgacgaattgctactttgacaaacatcggaaatgctaaacgttatcgcgtgtcgccactgcgtcagtctatttactcgtagtccttgagccagcccttctccttggcttccttgaacatttcagtgatagcttcgcgctctccctggaccagatcgggatgccagaagtcaaacagcagcagcacacggtctccttccttcccattgtgccacacctcgtggtcgaacgcgtctgccagagtacgaccaagtcatcagctacacggccaacctaacctgcaccccaacccatgttccttaccatccagcacgagtgccttgccctcttcccactgccgcgtctcgtcacccacccgaatgccgcagccttcaggcacaaacaacgggaagtggcaacgcaggcgaatgttgcacggagccgagtgagccttgatactcgactacagcacagttatcacaacaatacccatgtcaacaactacagcccagccatgcctacacagtaatgaccccccctcacctctggcttgagaacggagaagaacgagtaggtgaacggcagccccgccatgaagccagggatgctctcgaggatctccaccgtcttggggcattgcacggcgaagtccgcttggcgccggccctgcgtcacgtacgacagccagtcccactggccctggtgcagctggtgctccttgtcgtagaccttgtagtcgctggcggtctgctccgtcttggccagcgcctcgcgctgccgcttgagcgccaggtactcgctggcgatggtctcgcggttggcctcgaggtgcttgacccactcgaacttgctggtgtcgtgccacggcacggactcgagccccgggaagcagaagagcgtgggcgacggccgcggcttggccgtggtcaggcacagcgccgagcggagcagcgcggcgcggtgggtcatttcgacgattgtcctggccttcctcacataagaaatgttacgggaaggtcgtttgatagtgatgttgcacgagtgaaaaacagcgctgattggctggacaacttcaacgagatcaaagtgctccatggtgtcgctgacgaaggaaaccagagcatagagtgcactcgtcttcgcccacaggatgaatggggcgtcgcgcgggttcttatggggctggcattggtcgaatgaaggtcgtctcgtcgggttagtctatttgtttaatctaacccgcgatatcgagagactgtttgtttgctgcaagtccgaaggacacgcattagggattctaaggccaaggagcggggcttttggagccggcgccacgcgccactggagcgagacaagctcgccttggggctacacaagaatcaagcggggcctttctgcatgtagcagctcgtggctcgcagctcgacgcagtcaagttggtgatggatccgccggcgacatagtgtgtctcgagttcgcatcttctgacgggctcacaggcgaggcagcagaacactagcactggactgcgtttggcgctggccccaccggtgccggtcaacagcggctcgttagcaccgaggccgagttcgcaagctggagagcttgatcagtttgcagcggctttccttcagtttcccaactcatcagtgtgaaaattgttttgagtttcgcgcggggtcgaactagaactcagtcgggaaaattggcgtgttaccagccattttgcgtttgcctggccgtggtgaagtccgagtctgaagccttactgtacgtacgaacgtcgggcttttgatcccgtgacgcacccgtccatcgtcgagcagagagagcgcaccctcctccgtctcgaaaaatacaccctcagggcctcgcttgactgcggccaagcaccacgaagccattttactccagcgaaactgactgtagcatgccagcataatgaatgagtccatcatataagagttggaggcggctaaggtggaggtcgggcgagcgaaatggccactgctgcttgtattgtagtccagacgcactcactatcgtcgtttggtgcagctgtatctgcgcagtgggtagacttcgctgctgtattcaccgacggcgcggagcccagctggcgctgcagtgcgtcacgggggactcgctgtcgtccagttgcacctggcttcaacatggctcgagccaatcggagactacgacctttcggcgcggcgagtaaggtgcaggaagaacaacaaggcaaggctgcgctccgacggggccgtcttctgcgcgctcactcattcctcatcttccgcccgcgaggcagagagcagcagaggcgttgaaaccatgggaagagacggcgacgagaacgaggacgccaatgtgcgcgccgtcgaggaggagctgctggacgaaatgttcacggagcgcagcgccgcgagtgacaaggacgacgacctgacgatctccttgggctgcagcgacgacccggtcgagacccagcggtccgaggtctccaaagactcaatcgccaccagcagcaccgaccgctcgagtctgagcttgagcaatgcagtggagcggctgcccgtgctcttgagagcctccagtcaaggcgcatacttcgacgagcgccagcgcagtgtggacccggatcatacggtggggcgcacgcgcgtgccgtggcactcgaagagcgtctcggacttgagagacccagccacgaagcccacgcgcgtcgtcgcgttcgatgtggggggcaagctcttccgctgcaaggagagcttgatcgccaagtacccgctcaagcgactcaaccagatcatcacgtgcggctgcggcaaagtcagctgcctggacgacgcgttcttcatcgaccgcaacccgcagcacttcgagatgatcctcgactggtacaggacgggcaagctcgtgcgccaacgcaacgtgaacgaggaagccttcaaagacgacgccatctactttgatttatacgaagaattgttccccactactccggctggggaaccgcctcagtcgtggccgactgtcaaggccccaccgggactgcccacgcggaggcggtcggtcaacgatgtcgacttgggtcgtggtaacacgaagcgggtcagcatgttcgctaacatggcgtccccacccgcacatcaacagaagcaggaagcagcaaagccatcgaccaatgcagataacgagtcatcctcagaagacgtagcgcttcctaccgctactacagacgacggtccgttgcgcttctatcgacgcgagagacgcgtattgacgccgaccagcatcccggtagtgttcaagatccgcaagttcgagcagctactggtggcgagcgtgaaaggccgaggcaagctcatggtgcgcgtgtgcgacgccacagggatgcaggccgtggatgttcccgaggccgtattatttgacagtcactcgcggttttacttgaaaggcgagcgcgcgcaactacagtacaacgcgttgttgcctggagagcatgtctacaccttctggattgaggagaacacgaacggtgcgagtgtccagacgtcttcacccccagcattggacatcgagttcaaacttctgttcacgttcgatcccggtgatcgaatcactccagcgatggagtcggaattgtcgcgcgcagtgtctacagcgggaagcagcgatgccattcacgcgctcacccccgagagaactccacagatcaatggcaagaccgagtcgttctctccgtgtttgttcttgccgccgtcacaggtacaacgcgctccagagctcacgtcgcttcgggacgcaggaacgaacaggtccaaccaggtcaaaccacccaaggaattgtcgccgttgaagaagaacggactcaagcgtggcagccagcagcatcagcagcacttattgtcgtctccgattcgccacgcaggggcttcgatcgtgcggagcgtccagcagccacagccacgaccggcagaggggaaagttaccgtttaccgaccggagaagctggagctggacccggccagcgactcgcctacgttacttggtctgcatcaccagcctgcgagctccgagagaaggatcatcaaccaggcagtggagtcagcgtatcacgatatgcagccgcgtctatttcgatgagtaacttgtacaaggggctcgtgctgatagaaatgaagatgtctaacgatgatccgacttacttgttgatgtctacttggtgagtgaagtgggttcacgctccttgggggagtagcgacgtcagtagccgctccatttggccgagactgtcggccgacaagcacagctcgtcgccttccgagctactgcagacctcctggagcagctccagcatacccaagtactcttggaactcttggatcgtccacgagggctcgtcgcctcggccgacttcgtctcgagcgagcgccgacacgcacgttgggctcagcgtggcgcttcgcgtgcaggcggcgtccgagctcgccggcttgcagataatgggcgagcggacgttcaccacgtcgtcgtcctcgtggtcggccagagcaaagcggggcaaccccgcaacgccgaaagtctggcccaacaactcgaaaccgtcgtaggagaccatgggctcgcaggcgtcgtccgaggaaccgttggggccgtgctgattgccactgtagtcaccgtcgtggctcgccctactctgtcgctcttgctgggactgctcgtcgtcctcgtggtcgacctcggggccgtcgagctgcttcacgtctttagctcccacctcggacggcgcaggagggggaacagactctgcagctgccgccaagtgcgcgcgcgggcctcgggcgacgggtgcttccagttggttcatgctcctctatggctggggctggctcggtcctcggcgtgttggctggcagatcgcgaattgcagagtgcattgagctcccgtggccgggcggccgacaaagtcgcgcgtggcagctcgcccttccgctctatttccggccctctctgagccggcaatgagtcgaaaaataaatgcggactgctagtgcatgtaccacggcgatcttggcatcggtcgcccgccggcacgacaccgaaagcgcgttccccaccgcttcgcgcggggatgtcgctgcatgcgccggcgggcacctcgaagccaacgccagcctcaccgtcgatgccgatgccattcatgcccactacgtagtagtagtaggcatgagactaagatgtcggccgttgctgctcgatggcagagtgctgggatggctcgtagctggctggcttatcctgaagtgccgtttaaccggccccttgctcagtttagccgacaggagtgcatgctgctggcagcggcttcagcagacttgcaatgcaatcgatagctgggtaagttctcagccgtgagcagcacttcgctcagctcgacgtggctcagcactgctccgttcggagcgtgcactttttggctgacgtagcgcacgccaagctaccaaaccgttacgtgagacgcccaagttgctggcctgacgagtgggtggctgggtagctctaccttgcctgcgcgccgccgttcaagcgactcggcgagaactccagcgttgtgatcaagttttggttgagcctttggccaatttgccgcgcctcaagcgaggtttttattggccgctccagttgaagtggtcgccacgtggggcgaacgcgctgggaaggtgtcctgctacgtcgcaacggcttcccggacagttcgaaatcttagtcatgcgttatctccactaccgtggagaccgaatcgatgcgtctttgacgcaggcaaagcaagcactgcgtatgccttgtgcacggccgacgccaccgcactcctgttgctctcaatagtctgcaacttaaatgctcgtcgatggcgaccacagcggcgagttacctgccgcgcgagcaacaaattgctcaaagggaatgcatatgcattacaagtattgtgtaaattgatctatcaaggggcttggcatgaagctaagttgagcagttgtaacataaattcagctggtggttcgcttactggcaaagcgcgggagtcgcatcgacgttatcatagcccgacacgccctagttggcagatccgcgcaggccagcgcggacaccgacgttagcagcgcccgacacgcctgcattggccgcgccattcacaccgacgccgacaccagccgacactccgccggaagtaccgcccctggtggagcccgcaacagcagcaccgacaccgacgttagcagcgcccgacacgcctgcattggccgcgccattcacaccgacgccgacaccagccgacactccgccggaagtaccgcccctggtggagcccgcaacagcagcaccgacaccgacgttagcagcgcccgacacgcctgcattggccgcgccattcacaccgacgccgacaccagccgacactccgccggaagtaccgcccctggtggagcccgcaacagcagcaccgacaccgacgttagcagcgcccgacacgcctgcattggccgcgccattcacaccgacgccgacaccagccgacactccgccggaagtaccgcccctggtggagcccgcaacagcagcaccgacaccgacgttagcagcgcccgacacgcctgcattggccgcgccattcacaccgacgccgacaccagccgacactccgccggaagtaccgcccctggtggagcccgcaacagcagcaccgacaccgacgttagcagcgcccgacacgcctgcattggccgcgccattcacaccgacgccgacaccagccgacactccgccggaagtaccgcccctggtggagcccgcaacagcagcaccgacaccgacgttagcagcgcccgacacgcctgcattggccgcgccattcacaccgacgccgacaccagccgacactccgccggaagtaccgcccctggtggagcccgcaacagcagcaccgacaccgacgttagcagcgcccgacacgcctgcattggccgcgccattcacaccgacgccgacaccagccgacactgcgccggtggttgttgtacttgattcggagctggaccaggttaacgaaggggagtctgtcattgttactgtcggtacatcgggggatgtcgtagcagttggtgcttcggtgttgcctgcctccgtgagcgagcccatgacagccgacaggacggcgaggtgcgcgatgatcttggtgaggttcatcttggatggggtagaagacttcggtgaagttgggttgaagctgggctgctggtaagcgtgaggcaaatttgaaagtgagcaaaacctggagcgacatctccattgcagcaagtggccccaccataacctcctcacgggttcatcgctccaatctaccagacagaaccacacttcagcgttgcaggctgtttcgactgccacatgaagataaccgaaaagcgccatgttcacttccatcacgatggaacggacaccggatggccaaaagcgcacgactggcaagagtgatgttgaccaccccggcatgtgagcgatctttgtccgcattgtagtcaccttggtctggcaccaactggacccaacgtccgcaagtgacaagctctgacccccacgttctcgtcaacgaggctagatcacttcgccaccaaagatatttgtcgatggagtgcggggaaagtcttgatgtcgccgtgtcgagacgaagatattgtatatggcgaactttggtgtcgacagtttggagagccgcaattgacgtttgtcaacttgatattgcctcttctcctggtggcacttcacctggttgaagcgttgcagccgcgtttggatacgttcagaaggacatgacttcatgtagtcaatgcacgggctcatttcaatcaccagccggcgctgttcgtgcgcaggtgatcacacagctcgcagccgactccctattctgcaacagcaccgcagagtttgcacgttcaacgcactctcgcttgcctgtgtagatccacccaagccgcctatccctctccttgtcgaaccgagtctgtccttttgggcgggcaaacttcaatacttcgaagtcgtaacaccaaaggtgtaaaccagcttgcgtttatgcgaaaccaagcatagaagcacgcacgactacgctcggtgccgctgcaaaaatcgcgcctgtccctggcagtatttgcaggctactgctgcttgttgggggtccagttttcctggctatccactggtttcctcggtttctttggtgtcacagccttcattggccgtttaaggacatcattaggagggtggggggatcgggaagcgtctgtgaatagaggaccacacgtgaggtttaaggctgcattgtcgaacgggcaaacactgtttaatgcgaagtacctggtttgctgggcgtcgttgggttcgatcgtcttcgctgcgaatactcgaacgctagcgtcattcgatgaattgcttcttccgtggcgataaccgcctctcgctacgaatgcagtcgtaataacgaacaaattagcgagtttttccgaatcgttttagccatctcctgagtttgccacgcaccattccatcgacctgagatgctacggtctggtacctcgactccaagtaattgcacttggcctgtgtcgatcgtacttcttgctccagcatctccactttcaggtctcgatcctcacgtagcctccgttcgttgtctagctctttcttcagctgcaagcaacaacgttcccatcgccacacagagtaagcctcaaatcaccgtaccccaaaccatctgcactcgtaccgtatccatcttgcgagccaactccagacctatctccagagacttatagcacacgtctccaagtcgctcttccgctgccagtcccgcttcatctcgatctctttcttcttcatcgtcatctcgttcttcgagacccctctcgttatcttctcttggtcgcacaacttcttcgtagcctccatcctgctcaactccctcctgcccctcacgaggccccagcccctccttcaacttggtcgccaacccagttctccccactcttggcgacttattcctctgctgtatctgcatcttctgcggggtctgctgcctgctgatcctctctgtctcggtctcgagctcccacagcatctgctccagcacctccagctcgccctgcaagttggccttgtgccgcgggtccatcctgtcctcgtcctcctccacctggaaggtcacggcattggccaccaccgcccggcgtcgcggagtgggctcctccaggtccatggactcgtccgcgaactgcaggcgcctcgcggtctgcagctcccccgtgtcctgcacgtcggccagacgcgtggaccgcttctgtgcgctccgcggcgtgctccacgcggagctgtgcgcgctggcggccgccatgcgccgtcgagaggccgacgcggccgggctgcgcgccgagaagtgcgccgcgctcagctgctgcagcgcgcgctggagctgctgctgctggctcagcttgtactgcgagtcgtccgtcaggtacgtgttccactcgggcttgcgctggccgctgcggggtcgcgccggcgtcggtagcgagctatcgccgcgaccgcgaggtatccgccgcttcatgggcgcagggagtcaccggtagtgttggcactagttaatatccgtgaaatttaaatcagggttattaactgttaataaccgtgctcttccgattttcacatttatctacgtcatggaccaatttttttggttggggttggggtgacgccctcccccggaatgcgtggccagcatgatgctagctacgcgcttccggcaggtgctctcgggcatctgtacgtccctagcggttctttccttcgcccccaagccggcagcactagcgacaactacacctcccaccctcttaccgcgctctcctcgccgcgcgcatcaaactaaccgttttaggataggttcgtttaatgtccagtcgttaggttcgacccgcaagcagcaggacacgctcccccaggacctccggcgctaccgcatcgacgttctcggcatccaagaaacacgcatctgcaccctcgacaagaaacgtatcggagactacacgctactcacactaccagccgtacaggagcgccatgggatcggctttgccatctccccccgcgtccgcccctacttacactgctattgggcacactgcgatcgaatcggcgtcgttcagctcttactcccccacgcaggccccgtgaacatcgtcacggcgtatgctccccacagcggtcggcctctcgccgaagtagatcgattctacgctgatctcagcgacacacttgaccaactaccaaggcgcaacatcgcgttcgtgaccggcgacttcaacgccaagctcggacaacagatcaacggagaggcattcatgggaccacatgcacgaggcatacgcaaccgaaacggccacgcactagctgacttctgttctactcaccttctctttgccactaacacaggttttcaaaagcgagcccgccacaaaacaacatggagtcagcgccggacgaatcactgtatttacaaccaaatcgactatatcctatgccctcagaactgccgacggctctgcatggacgcacgatcctggggtggaacgttgacggcgtcggacctcaagctcgtcaccgccgacttcatcctgaacgcggccactcaccgtctccgctacagcgcggtcaagccagatccagcactcaagttagcacgagatcatctcatctacgacgacacagcacgagacgactacacgaacgcgcttcaggcagcgctttcacagccaacagcacaaggcagcaccgttctccagcgctggacagacacgctcgatcgaatccgagaagcagccgaggggactataggattcgcaggtcctaaccaccgccacgtacgacatcacgacgatgaactttagctgctctctgaggcccagcgggcgcttcagcttcgaatctacaacgactgcgccgctaacacgatcgagctccgagccgcccgcaacaagatcctccatcaaatccgagcgcgatgccgagccatcgcatctcgcaaactggacgagcggattacacgcatcgaaaatctgagcgactcggcacgaatgtatgcagcagttcgagacattagcccccatcgactccaaccgctgttactccacgaccaagaaggtaagtatatcctgcggcaacaaactactaacaaggtgatcacagatcacttccgaacgctgttctatgacccggggcggccacatcctgatccggatcgtgaaccgcgatctctaacccgccctgttacagcaacagaagtcgaagcagcctttcggcgcctcaacaacggacgcgccgctgggccagatgagctcccagcagaacttcttaagtacggggcttcagtcctcgcgcctctcttcgcagacctcgtcaactgcagcttcgagcaaggcacccccctcgcactcggtgaaggaacactcgtgtgcttgcccaagtccaacaagccccgaggtgtatgttccagtctccgccccatcgtgctgttaagcagcattcgcaaggccttatctctcgtcgtactcgcacggatatccgctgcggtggacacattcctgtcccccaatcaaagcggattccgcaaacacagaagcactgctgacgccatgtgggcgcacaaatggctctgtgcccgcgtgcaacgctatcgtgaaaccatacatgtcctcggcatcgacctctcgcgcgcgttcgacacaatcgaccgcgtcaagcttgtagaagtactccagacattcttacacgacgacgaggtctgattgatcaaggttttgctcgccgacaccaagctctctctgcgctccgggtccaaggcacaacacagcttcgatagcaacatcggaacgccgcagggcgatgcgctttcaccggtcctgttcgtcatctacctggaagctgcgttacgcgacctcgcatcccacctcggagtgaatcggaccctactcgaccaaatgatcgtctatgctgatgatgcagactttgtctgccgcgataccgagctggtccagcgcatccaagccgaagcaccagcagtgttcgcacgctggtccctccagatgaatgcaaccaagacagaactagcgatgtacaggctcgtcgggctactcccgacacgctcgggcgacagaagaggcgtggcgctccacacagaagcttggcagtctactcggcgactcagaagatctgacacgacgcaaaatactcgcagcaggcgcgctacgtcggctctggacaatatggatccggccccagtacgtcagtgatgccaccagagtccggctgtataactgctatgtgcttcctgttctgctgtacaacagcggaacgtgggcactgacgccgtccgagctgagcgggctcgaaagcttccaccgccgacaactacgtagcgtactaaacattcgctaccctcagcgaatctctaacgccacgctctacgaaatctgtcaggaacgcccgctccgccacagaatcacagcagcacgatggcgtctgttcggccacgtcctgcgccggcccgagatcccagcgtacacccagatggccgcctacttcgactcgtcgtccaagggaacctggcgtggacgcccacgcacgacactaccgactgtgctcgatgcggaccttatctcgagcgaatacgcctatcgcctcgagacccgccgtgacctggaccaacttcggctgcttgcacaagagaaacctaaatggaaagccctcgagagggcaattgtcgccgcactgccggcgaagaaggacccgacgtatgcggacaccaccttatgccgtcgactagcaaagctgagcctagcgacagcatagtgtggcaacgcgaaaacgtaatacattacattacatggaccaattcccgagtctcttcgccttacagactaatttcgccgtctagcgcaccggggggggtgtttcgagcggccgcggcccactgctcggcctctcagctctatcgtccagaagaagtcacccagacagcatatgcaggaggagattaacggcccggtgatatccatcgcgtcgaacgccaagcaggtagcgttgctcaagtacgccgggccaagcaactggcagcagcagccgcagaaggcgaagaagtagcagcgacagtagggcggcgggagtgccaaggaattcaagttcaccatgaacagctcgtgggtcttcacgcacgcccacccagtccaagatcgagggatacagcaagaagaaggaggctgaccaagaaggagaatgggtgaattcaagaccccatatgcagaaatggacgcgatgaaggtgcaatgtactgtccgcattttaacattacgggggctatataattaggtactgagtatgtgacttcgtgtcctctagatgacgctaatgtagcgctagcctccaccttgagtttgtggcgatcttagaggaagacgccgccgcccctttcgagcacgccgacgatgatgaacacgatgaggcccggcaggaacgtcttggggagcgtgagagcgctcgtgaacgtgtccggcgcaactgagcttggcctcgaccgcctcctgcacccagtaggtcggcagcaccacatccgttggtagtggcggccgcatgagatcgctcatggaggcgtagttcgcagtggttgaggcggacagcgcgtacgagatctgcaaccgcttgcgcgcgctcatggtccggcccgtgcccgacgcgaggtccacgaacatatcgtacgcgttgaagtagctaaagaccaggttgccgtccgagtcgtatatggtgtgggtcgtgccgtcgcttttggccatcttcacgtcctccagcaacgacgagtctctatagacgaagaacgggccggacatgtacgacaggaagcccgagacgaagctcggctggagcaggccgttcacgaggatgaccgagccgatcgtggcgtgctcgtccgagtacgcgtagacgtcgatcgcggtgccgaaccggtgcagtaactcatcgtcgatgtccgcttccgtgctcaagcttgcgatggaggtggagatctcgaccgagcccaagtactaggcgaagccggcgatggtggtgtgcttggccacgccgttgatggtcacaccgagggcttgatgccggctctcgtttgcgaagaggacgaaggatagcatgaacaacaatagtataaaatctgttattaaagagcaatatcgaacatatattatcttgtttcccatgttaccgctctgcgtacttgagaagctggaggggttcgaaacctattctgagctggcgctgcagcttcttgcacgtcttcacccgcttccttttcttcgcactcagaggtaatagcagtaaccgccgcccggtggtggttgctagcgacattttcatcttcttcgtcttcgctctcatcgctgatgtcgctgtcgtcgtatgcgtctggatagagctggtataggatatggttcacttcggattttcgcgcaatattcgtataaacgaacacaagcttgttcacacgctcaggcgtgaggcgatttcgcagcttcgtgtggataaatccgtggatactccaactacgctcgctggacgccgacgacgttgggatatacaacagcaactttgcgaactcctgcaccaacgcgtaggtgttcgaggtttctagcgaccaccatgcgatcgggctgtaggcgttgttatcttcacgcgatttacctgtccacgcagacttcatgaggacaaagtcttgcagctgcttgtgaaatttctccgccaactctgtcggtaccaattgcaagtcctgggcaagttgcgcggcatcgttaatcagtgccttgacctccagatcgttcggatcgtacatggtcttggtctggtcaagcaggtatgcaattttcaccgtcggcgtgcatatttttcctcgtcgggcatttatcagcccgagcacctccgcttgtagcaacacgctacaatcatcaagcggctcggtgtagactggatgtttgcatagccaactaaactggtgatacaccaacgacaagctgcaggcgtcgcgctcaaacgcagcgaggcacttgttgactggctggatgagcttcaacacaacggcagttttttgccagaaatcgtcatagcgaaaaataacgagtgcctcgtctagtgatgctcccttgtagttcttaagcagcgccgtgtccgagaaaatagctgcaatgatgtctttgttgtgaaagacgttcgcgacgcatttttcatgtgtataccaccgcgttggcactggtagcgagaggcgccgccgtttttcccctttctttcgaagcgcttttttgcagatcgcgaaatcttgaccacaagcgccgatgatccttgaaaaaccgaaccagttgttttgcacggtcaagcacatccttgaaaaaatccagattgaaaatatctttcatcagaagattcatgccgtgcgcagtacagcccgtacatacaagtccgacgcgctgttttcttacgagtcgccacgccttcttcatgttggcagcgttgtccgtcactactgaagtgactttgcctgaaccaattacagactcgaactccaaaatggttgaccaaattgtaccagcgatatactctgccgtatgagcttcagcttttgagttgaccgacttccaaaataaaggtggggtccgagggttcacaaaaacaaagttgataatgctatccccatttgtgttggaccacccatccgtaatgaggccaagttcgtcacgccactctccgttattctcaaaatcaactgagtcttctcgcggtcgtaaaggacgtccagcaaacgccccgaaatttgacgtcgagaaggcaattcatagttaaacatagcttggaaaagaggctcctccacaacacgaaaagggatcccagtcgaaataagcccaattgcaacccgcaaataattctcttctttgatttcttgggccgacttcttttgtgtgggttgtgacgatggtgatggccgcggggtcttgcgcgggcgagatgagccgctactccgtggtgaattcgtaccaaaaagtcgcttcgtcaatgttggcgttcttgggccccgaggcttcgaaggggttgtcagcttcgccgcttgcttgtgtcggaggtccgcttcgtggcgccgccaccgttccttcgtctcctcgccgatcttgtcgcacttgatcgtatgctgcaccagtttcgcgacggctgcgcgttcggcaccaccatttcgcaacccaagcacatggcatcaggatggggttttacacccttaattctgggtgcgtgctcacgaaacaaagcccaaattttgtgtttcggcggagccattgcgccctccttgctgatgttcacaggtgtttgagggacacaccacggctttggagcagtacgcacgagggtctacggtaacggagtctggaggttggacacgtcagagtcgaggacagacggtcagtcgttcaggcgccgagaaggtcgcgccttgcacaccagcagcagcaagttcacaaggtagttgcagtcgttgaggggcactgccagttgcgtcgaggagctcgctgccaacgacgagtgcaggtcgcgcgtcggcaaaggcaccagttcggccaagcaagggctctggggggggatctaagtgtgaagcctctagattccgaagggggagcggggaagaccgcctaacttcaatacctcctctctgtattgcgcaacttcgatattcacagtgaacatcagctgtgaattacgtgtgaacattctttttaactgaatgtaaccgttaataactggtaattaaacgtgaattgccaaccctagccaccggaacttgctttggtagtagtcccagaatagtagcgttagtaggcatattcttctagccccagaccttcttctgtatcctacagaataagcattagacttgattaaagtatacttcaaaacctgtcaaagatttgctgttggaagccctttcgcatcttgcggtcaagcgctgggtacattgtgcacagaacagctacgaaagtgcacaaaacatgctcaatgtatccaccatatgccgaaatggcgagcttctattggtcgtggcgagcgtagagcacgctcaaaacctgctacatggtaataccttgcaaggctgctaaggcagcatacttcggctccagccacccatcttcggcacgtcgcgataaacgcggaggaagaaatcgcccagttcctaactgacgtagtgaggaggaactgggtgaattcttccttgtgcttgacattagcgcatcattagatttctttagcccacctaacaagcttgttacgattgtctctctaacaacaccagggagcttgcatgctcaatagcccgtaatgacacgcactgcacacggttcctcttgtacgaaacaggacaatatatgatattcatgccaacgtctacttctccctttacatgcgcacgctcttcaatgttcgcgccagccgtgggtcatcttcgccattttggcagcctccgctttgctctgtagcctccggcactgccgcttcattcctgccgctttcatcggtagcctccgtcgtagcctctgtcccttcttctgtaatctccggtgtaacctcatcacgcgatgagcttcttctgtagcatccgtcgtagcatctaccgcttcttctgtagtctccggtgtagccacaccatgaggagcgcttcttctgtagcctcttgagtagccactgcatcagctacaatatagcggtagacccggctgtagccggcttcgtaggaaccgatgaggttgtgcgctgactccgcaatcgatctgccaatcgggccacacgcgagagctcatagcgtcgtctgggtcggatcaccaggtctggtaatcaacatcgcaacgtagaatcaatataccactagtacgatgttacagagcaaagcacacgctctcgcttacctgtagatcacaatgacgctcatcatgatcgtcttcggccatggtccttggccacttgggcacgctcgacgggccccaacaaagcttgcattgcgacgtcttgaacagcgcagtttcggaatgaaggaaagtacgagtggctgacacgcggcggttttaggcttccacccgaatttttaaacctgttggtggtttatactcgtccgtctattaccgcggaataaaccccgtctatcttcccatcgctaatctaacaggaagatgtgcacaataccggctatacaaacatccatatgagaagctcgaaagagaggacaagtttgctggatattatgtcctgtgaaaatgcttattctgtaggatacagaatacggggttagaggggttaaaacagtgtatcgtcgtgataaaagaccagtgaaatgtctatttatcctgtaattcgagagcctgaaacctaattcgtcgctcagcttagcaaacgcctgttcagtgcggtgataaaaataaccctcgagatagtaacattaacaccgttcgtagaaggtggcactggataatctctacactaagttaagcttacaatcatactgttggtgcttaaaaccaggtaaaatgcgtgtttttggccccggagagcggtatgatagatgtaagccctaacctcttcttaatctctgatttgcttcctgtaaagagggttcaagaggacataaaacacatgattataggggggcttcgcccaagaacgcgtgaaaagcacacagcaaatcagggaccttctaataaaagcattctgggggttgcacccccagacccccgcagtagaaaaactaactccgagttgcggcaatgggtccgctcgctggaatgctcgtcgctgggcccgcctccgcaaataccgcgcggccctgcttcgcgggcaccccgcgcgggtttgctacggctacgctcctcgcaaccgctcattaccgccttctaatatggtggacctacccctaaggctgtgtgtttttcagacttttgtgtgtttctactatttactcgcttcgccccagctacacatatcgacggaagatatggcctattggccggaatatgcacaacaaatcttcccgcgtattctatatggattttactatggttatgtaattttgcctgtcgggactgcgcatatcgcttgcacacaaaaatgtaacactgcgtttttgtatgggtgtgcgtaagtctttctctgtccgtaggccttatctttcgtcgatatgtgtatagctggagccattactaattatatagtggccaatagtagtgctattatcactactaatgtacccattcctcagatagcacgagtgagtggccacgcaccaatctccctctaggcttccaacttcacgcaaacgtgccataaagtgcgcgaagccaccaaagtgccatatcggagacttttccgtgctgtgtatgcggccgacaggtgcatcatttgtgcaacaacgtgctgtgtgacaaatgcaagctaacgttagctcaaaggtaacgcttctgttcgtggttgccttcgtagcttcaattgtactaagcaacttcccatactgatttcgcagccgcaaacgtgttaccagggactttaatgcggagacaccgactcccaggagcctacactcaactgtaatcgtcgttaccctcgagattctcctgacttctgagtaagagtaacatgcttcaactttcgagtaaggatatttcttttggagttagtttgctgtataaactagaagctagatacatcaacgtaaggtgctggctgttgcactggcacacacgaagtgaatagcacgccacaagcagtcttgggggggggggggttgtatagtcttcggcttgatgacgcttaactttcctattatcctcttctcgtcggtacatgaatgccgatgatcttctcctcatgtatacttgcgctgtgcctacttcctcttttttctaggttgccatactaggcatggcatctttccaaagaaaccagaagccttttacgaagttactcagaagtcatcactttactctaaatccagtacctcactctatcgcttgtgatcgaacaatgtgccgaccgcaatattcaggcaaggtaataatggagatcgtgtgatatagaagacgcaatatacaggtctgtagcagcttttgcacatcgagtgagtggtaaagagaagtaggaggactggaagacacttgtcgatcgtagagtaaaactcagagtgattcattcaacacatgcctgcaacgcatgactcccataaacgtgctgtgcacgagaaggaaaacatgagcgtaaaaaacctttgaccatacaacccatctatcaggcttgtaggccgactcctagcatccatctaggacatgaccaggacatgagtgtggacgagagagtagagtacgaccgcgtcctatctctaactctcatagtctggagtgtcagctttgaggaagcatttacgtgtgcggaggatcgcgaaaacttactcgtgcttgaacgctgctggtcgccaagcgcgtctaaaccggggaatcctcttaggctgacaacggacaacgcgcacctagctcatacttcacatatggaggcctatggaatggtcattccccaaaattcgtatgacaatgtgggccacatctgaatttgcgttcgacaccgtgtctgacccggtagacggcctcgagctaagcctcagcgtcgctctgcgggcgctgccttcgggcagcgtctagtcccttgcgggaactgtggggacgtctctgtgggcaaggtggtgaggtggcagcaagctgtggccaaggactcgccgcgcagaaggcttcgctgcgcgctaagaccgggtccgccgtagcgggcgggctgtaaaaggcatggcccaggaagatgaactggacgcgcgacaagaccaaggcgtagggcggactcccgagcgggactttgtactcaacacgacggcggacgaaggattcggcaggaggagcgcaaggcacaagaacagatactacagatcaaggcgcgaggctacgctggacatgatgaagaccgatgcgcggacgtgcaaggagcagaacagatactacagatcaaggcacaagaagcggagtgttacatcgatcgacggcagtaccgacggcttccagacgttgacgaagggacctgtgaaggagagcgacgcagcgagccgccattttcaccaaggacgaggaggagggagggggagcatggagagcctcacatttcatggcggacgcggaaacaggtacgaaccggaactgtacccagtgtagcaaaccaatttcctgtgcgcgctcaagcgttcctactcggacttgcataccccaacacggcatgcctcgcgttcaagagcattttcaaggcagtgtagcaacaaggacagtaatgtagcaggattacagagcgtgcgattggcggcacgccacccgcccacgagatattataatgcttaggatacgttgcgcgcagaggtggcagtggaataaatgctgcaggctctctactgcgacttggccgtgcgcatgcaggcctgcaagactggtgtcttcgagatgcctgtgcacaaaatgtaatagactctcccaagtaatcacaggcgttatttaactaaagattcctgaaaagccctgagctactgtacaatcgacggcttttaccgccggtatctactgttggcgcgtgtgttagttcgagaggcccaagtgggccccccactgtattccaggcaatagagtacatgaggtagttgggctcaagtagggacagatctgcagcttgtcgaagcctagcaatgcgtctctgcatgcgttacgcggttagtgccgcatttgctgagtctacttagcgatacacgtaggagcaattgggcggacagttgagctgggctacagtactaagctcacagccaagtcttactgcatagtagtggaaatgacttgtttggctgcaattaatggtcacgcaacggcgagactgtgtgcgtactgaggcaagaactcgaccgcttcagtgccaactacgcactgctagttgcacttcgtagttggcactgtagggcaactgcggcaactaaagcggtcaagtgctacctctatcctatccaacgtcatcaatatcgaacatcatacgaattttcacgtctgacgattgtctaaccaattccgtctgagaatcattttgaaaatacaacttggtcgagaccatcgatccagctatctgaccacagtaaacagcacgaccaatgcacgtaactgtggtttcgcccaacgcatttactcacaggcacaaagaccccccccccacacacacacaaaccgagcgttctcgacacgccatgcatatacggtattccgtacagcgtcgcccaaaatcatttagcgcacgacataccgaaaagactttagttctagctcgatcttaccgcaacaaagggcaataactgtgcagcatctactcaagccctctacgttgaagacgcgccttcgtgcaccgaaatggtcggcgttgttgcattgtactgttacgctggtcgacgatgtgcccgacagatccgagcgcgtggatactttcgtacaagtgcagcgtggcgcaccatggtgaccatgggcaggcctctacgactgcgcaggtctcgcgcatgtagagttcgcgcgaagacctggccgcgctctgaggcacagcagcctgcttgtacccgacacgacagcgagagcgaaagattcggtctagaagacaatggtcctttacgcccaaaacacaccgagacgatgcttccggcagctccatgtcggccgagcagcgccagcaggacgtgagcggggcggatggccagctgcaagccgagcctcctgccgaccaacacacatgtgagctgtatgacacagctgccatgctattaaataatggtgcctcacccagccgtgtcgttcgcgcagcatgtttgtgcgtgaagtgtccacttcccgcgctgcctctagctcgctacaatgtgtacatgaagactgcagcagctagcagctagtgctgtggcatttaacttccgccgcacccgtcagatggcagcctccgagcacatctctgaaaaggatgttcaccacggactcgacccgcctcttggtgtagctcgcgctagagctggagcttagagctgtacacctgcaacggattcgccgtaaggatggataaaacttggaggcactggaacaggctgctcctagacccatgaacttgcgctgagcgagtcaactcgactcattctcgattttgcttagccttccacaagcaaagcaaaacaaacacccgcctgagcttgattcgccccatcaactcgccccattcagcagtactcgacgctcgcagaatgaacctcagcaagatcttcgcgcacctcgctctgctgtcgctggccatgggggctttcgcggacgccaccaccaactcggtagttcgacagaacagcgcgctgcgcaatctcaagacggcaggaacgggcacgggcgtgtccacttcaacgtcatcgggcgactcgtacaccagcgcgacggactcgaccgcgagcaccacggctgattcggccacccagcaaagctcgacgactgcgaccactccgtcgaccgacacaacgaccacttcgtcggacacgacgactgcttctacttcgccgtcgacttcaactacctcggcggacaccacgacgcagggagcggacacgactacgcaagggacgacaactagcaccggcatcaccaacggcacgggcacctggggaggaaccagcactggggctgacactgcaaccaccagcggcaccaacacgtggggaacgagcaccggaacggatactgccactactggcggcaccgacacgtggagtgctagcacggacaccaccaccgactcggccgagacgccgtgtgctagcggagactcggatacgacgggtacacaaggagtctctggtgctggcaccacctcgaccgacaccactacgtctcagcagacgacggggacttcgggctggggaaccagcactggcgccgacactgccacgactgggacgtccggatggggtactgctaccggcacggcctccacgggcgcttggggggcttcaacagatactacctcgggcaccgacaccacctcgcagcagacgacagggacgtcaggctatggaaccagcactgggacggccacgaccggctggggaactggcaccgatacgacttctgccgagacgcattgctcgggcgaccagagctcgacggggacctggggagcctcgaccgacacaactactagcacaggcacgaccacccagcaaacctcggggggtgcaacctcgaccggcacgacgcatcagaccagcggcgcggatacgtcgaacaccgacagcaccaccaccggcacttggggtaccaccgggaccgagcaggctggtacggtgaccgctgctagcgagacgtccgactcgtggggctccactggtacgtggggcgctgcaacggacacggcgaatgcaccgtgctcgggttcgtcggacaccacgtcgggaacgtcgacgaacacctggattgagatcaccaacagtcctagcaccggaagctccaccaccgccagcaccgaaaccgcatcgggcaagactggtgtcgactccacctcggccgcgacgacgtcgactgctactacgactgcctcggagacgacgacctcgaccacctcagccgctgaaacaacgactgcccctgctgccaccactgccgcttcgacgtcttcggccaccacgtcgggcaagactggcgtccccgcgacgtcgacgacgtcctcgggcacctcgtcagcggacacgtacacgggtgactcgaccacgcagcaatcggcgacgcaatcccgccgccgctctctccgccactaagcggtcctctcgaaggtacgacgatcttggtgtgcacgcaacggccgccatccgctctagctcaccgttcgatgtaatgcgtaagtgtatacacacaggaagcactagtcttagcagcagactgatcctggccatgaacccagtgtgaataaattcacgtcttcgaatccgtttcagaaacaacacttttcatagatttctccaatgttgatttttcatagatttctccaatgttgaatttttccaaaggttcatattgaataggcgacctggggagtgagtacacagcatttactcagcaataatggcttgatctcagcgaaacatgctcaacgcgcaagtttgtcttgtatgcgaacccgacattgagccatttctgatctgtgttaaggcttcagaaatcaattgatgaacattacaatacagtagcaagataacgttgttggcaagaaaatagttgctaaataaatcgtttgctgacagtcgactaagtcgagtatttnnnnnnnnnnnnnnnnnnnnnnnnnnnnnnnnnnnnnnnnnnnnnnnnnnnnnnnnnnnnnnnnnnnnnnnnnnnnnnnnnnnnnnnnnnnnnnnnnnnntagatagatagatagatagatagatagatagatagatagatagatagatagatagatagatagatagatagatagatagatagatagatagatagatagatagatagatagatagatagatagagagagagagagagagatagatagatagatagatagatagatagatagatagatagatagatagatagatagatagatagatagatagatagatagatagatagatagatagatagatagatagatagatagatagatagatagatagatagatagatagatagatagatagatagatagatagatagatagatagatagatagatagatagatagatagatagatagatagatacatagatagatagatagccccacacagagagagcgatagatagatagatagatagatagatagatagatagatagatagatagatagatagagagagagagagagagagagagagagagagagagagagagagagagagagagagagagcaaaagcacgcagatttgtggtagctcaacgctcgaaaccattcctgataaacttcagccgacacagctggtacacgtaattgatagattggtgcatcgaaacttagccggaagctaagaatactcaagttgaagtgcaccctggatagatacaatattcctcccgtagtcgacggaaactatgtgaggcgacctactaagctttcaacattcgaggaatggctccaagtcgggttcgcatcagacctcggaaaatacagtaacatacggcattgcttccgcttcgttagcataataagcacgacaatatcactggcaacaataataagtacgacgcaattattgacaattcctccattacaagcgttaactgtcagtggctgaagtcaagcgcctacggcaacttaccagagtagtgacgtcccacattgtcttgttagcgcgccggaatacgagcatctcgaagttcgccgggagcaaactgccgcgctgcggtgtcagcacccacttgcactccaaaaacaggcgctcgcacgagttggatgtcggtggcaccatcgccgccagggcgacgtacgccacacgctctcctttgcgccgcttggtcccgccgccctgccggatgatctccgcagcgtagtcttgctcccgacccgcgcgctcgtcttcagccgcgcgtcgtggcatctcagcttgtgagcgctccagccgattcagcgccgtagcctccgacgttgataggctttcaccagcagcaaattttgcgagcccgtgcccaaatgcgggggagtgcacaatttttgacgtgggttttaggtattcacctacaattgggtagtcagccacaaccgagtcaaaatgaaggcgtacctcgcactcgtcgactcacactgcagtcgcttgcacacactgtcgagcttacgcagatgacgaaacacgtccccagctgcttgtgctcgccactggtatgaaagtcgtcttccacggcctccacgagtcggatgtgcgatcgcaggtccatgtagcgctctagcatctcgaaggtcgacgatcgacgaccagcgcttcgtgttgcgtttcttggcgcggaggagagtgagcttgcggaggtcggaggcgttgtttggctagcgtagctgagacattaggctgttaaccttttgtaacagcgactcgtgttccgttaataattttttaatcgccaggttaaatcggtgcgacgcacaaccgaccaatgagacgccgagcttcgtagtaatactgcgattggtgttgcagttgaccgcaacaatgaactggatcatgtccaccgtcttgttgtaaacggccaacacgtttcggaacagctcgatgtgtgcatcggcgtcctgacttccgtcgtccatcggcgacagcgccagcagcgtgcgctggagtcgaccgcccaccacgtcgagaccaccacgtagagagcgtagacccgacgaagtgcatggttccgtggctccagccgtcgaacagcaaaccgaacaggatgcccatctcgtcgctgatcacgatgcccagcttccccgccaccgtaaacatgtccgccttgagagccttggagttgatggggcgccactcggacatactcgcgtcctctcgtcgtcgacctcacacaaagggaagctccgttcaacaacccaccgcaaccactggtagcagcgggatgtttcttcggacacaaagccgaatgcttggagggggcgatcggcaccgcggtgacgggcgtcgtactggtcgagaaagtcgtcgtgccggctcgcccggtgccagacgacgttggagtagcccgtaccgggcagctgctttcggtctgctccatcgagcttgcaacgatgaagcgcttggccttaatgctcgaagaagaaagtgcagaggtccctgttagaagccatggtgctttgaaagtgaaattatggttcgtgctcaaagcgatagctggccaaatcacggctgggcgttaggagccactcaccatagtttagcaatgttgcctctcggcggtcaacccaagtagccaacatgaaccggaccggatagtgaaccgggacttgttaaccggaccaagtccacttggaccaaattgtattgccataattgcctcaatttattatttttttaaagtgtgggtgggccattaatcgaccaggtcccaaacgccgctcccaatgaggagagccaatcataagtgagattccaaatgacttcaacaaagtatggactggtttatcggctccaaagccaagaaaaaaccttaaggtattatttttggccggctgcgcagccttctccgccttcacactttccgccccgcatcgccaacacgacagcgcgctctgagcgtgccgcacgcctcccccgccgaccaccccagacccgagtgcccccaggcgcgccccacgcgccccacgcaaggacccgtcgaaagcagctacaaaacccggtagggcgggtgttatgctgacggttttggtagctgtcggccaagcacgaggtcgtgcgcgctcgctgacggtatgtgagcgtttttctattgtgtatgactttgtatcgggactgacgggaatccatgcgctctgcttaagttgtgggatggcgatgacgggtgcatttgcgtcttgaattcgttgtatgaataggaatgtattaagcgttaatacaagctgcgtgatcctacgactccaagtcgttttgcttccattggtgactagctggtgtgcagcggtcgacgatgccaccgttcgctttgcgggtgataaatgctgagcagagcgcgtcgtacgcagagcggtggtcaacgcgcagctttctccagcgcttccgtagcgaccccgcggttttggatcggcctttaccgtcgatactcccaagcgcagcgttgaccttcttgtccaagtcttccgctagcgtccagacacgcagcttccacagccgatacacaacgccgtcccggtctagtggcgccgttggtacgtctacctctcgccctgctgctatgatcatgatgttgacgcctgccttgaggtcagcgcgaacaaattgttgtttcttttgggttgccgtgtgccacagctccagtgtgtaccagttgtagaagcagccagcaagagagtgcgcttcaacgacgatgtcagtgctcgcctgcggggcctggccagcacagcgacaaggagcaggaccgtcagcgctggtggacttgctctcgtggaccgcgacgagcttctgaagtgtgcgctgcattgctgcgatggacgatagcatctgggtgacggctgcggcaagtatggtggtgtttccattgctgcgttcacccagctgtccgaagttctccgtttgccaagccgtgcgaagctgccgaccccaaccaatgcacgtgtccagcgagagccgagctcccagcgctacgttggttgcgtccagagcttcgtggaagcggtacaggtaatgcgatgtgaagcctgtggcagcctgctcctgctggactgctgtcgcgacgtcgtcaagatggatgagcagggacgcgaacgccgcatccaggactaaggcgtcaacgttgagcgtggtgtccgtgaagccgctgacgttcttgaagagctggccgcgcagggttaacagctgggcgtactcgagcgcaggaagaagctcgctcaaggtggcaatcgtgggcgtgacgcatggcaggtgcgggtctcggtatccagcgaagactttaccgacactctggtcctcgcatgtcgtggtacccacgtacgcgaacgccttcgtgagcgagtccagcagccaagctccccgggtcgagatccactggaccgcaagctgcggtgaggcgtttgcatacgctgcggagccgcggcgcaaggagtggctgctcagccctgcggtgagcgtcgggggcagcggggcagaggcctgggcttggcgctcgcagaccatggtggtgacgtcgttaatatacttggacacgttgggccttcctctcacgcgctttgttggtggctcgttccttggttcagctttctcttcaaggttctcccagtagagtatagcttcgtcttggctgtaggtcttctcccctggcaaatccgatgccgccgcgtgcggcactagcgggaacacatagctggaaggctccgacgctccgacgaacagcattccgaggccgtgcagtatacactgctcccagtgagtcgtggccttgtaaattgagatgccttgaaccaccgaagtcttgattcgagctagatgcagaaagagctcccccgatgccgccatagatagctggctcttcctagcaaaacaggtatcgatcgctcgaccaaacgtgtgccacattaacgttagtacagcagcgtcatgcaaactcttataacctgagccaacccccttaatcgcagtttcctgcaccagaacacgcaagtcgctgagcgtgcagcctggagcttcaccagtctgcacgccagctagcaaatttcgctcctcaatagttgaacccattttgtcgcgtattttcgcaattcgcttgctgtctgacaagtacagagggtaccgctctcggagcaggttcacaacttgggacatatagcccacagcagtagccttagcaagacggcctcctcgagcacttggcttagtttgcaagaaaatggagaaggcggttagcaaagagtaaaagttttgatttggtagagcatcaggaatagacagcgacttcgcaatactagcaattgactcctcattcatgttagcaagagctaagaattcgctgaagcacttcatcgccgcttcctcctgccctgctgtcccttgcgggatgtcaagccctctcggcacccgctgcatcttttcaaatgggagaggagagaaagcagacgagtcacagccaccaacgatacaatcatgatttgtattgcgaatttgcggtcaaatatgagtaatgcaacaattacactaaacttttgtattggacattattctagcaagactgtaaattcccaaaataattgggaaaatgttgggatacacacgaatcgatcgtgattggctagattcattgaagaacttgtcctgattggatagatgcaatgacagagaagcgcaaggaatgccaagttgggagaaagcttccttatcctacaataatctatattataatatagtgaatacagttatcgcaattccgcaattcttttttccgagacctggttcgcatacaagccaatactttggagtgttcgatagcttaaaagaaacacaagacacgcctctttcgataaattcggttaaatcgcgattcgtacttaggttcgtaagcaactttttgtttgacgcggtctcatttagggtcacttattcggctcaagttgcctctacgtcgacgcaatcttctagcgttccaataacgatgagggtacattgattcgattcttgacttaaactcgtaggtgatcgctagcagacccctaatgcggcctcggtagtcatgttggtaagacatgcgccaaaatatcaaaccatgttgttttgtaagcgcttgcacctatatttacgcaatccacacgatccacgggcagattctgcggctgcgaagcaggcgcaggagatgcccgacaatgcaccaccactattagcacgaagtacaaccgattctaaagcaaaatcaataaaacgaatttgactcgatgaatttgcaaatgaactgggccagcctccgtcctgccatcatgttgaccgagcgaaaacaaatccgatggatgtcgcttgagtggcagataaattagaagtcacaggtttatatacttgattagagggtattcaatagaataggtactttgacttaatctcaaacggatgggtcaacatagcagcataatttgaaaatatagccggctatctattataacaggtatcgcaacaaataaaaatcactgtctatcaaaaccatctttaacaggtttttgatgtaagaataatagcaataaaatccagagaatacgagaaatctatgaaaagtatgaaaaattgcagacaaatacgcgagtgtcgacactgttgtttctgaaacggattcgaagacgtgaatttattcacactgggttcatggccaggatcagtctgctgctaagactagtgcttcctgtgtgtatacacttacgcattacatcgaacggtgagctagagcggatggcggccgttgcgtgcacaccaagatcgtcgtaccttcgagaggaccgcttagtggcggagagagcggcggcgggattgcgtcgccgattgctgcgtggtcgagtcacccgtgtacgtgtccgctgacgaggtgcccgaggacgtcgtcgacgtcgcggggacgccagtcttgcccgacgtggtggccgaagacgtcgaagcggcagtggtggcagcaggggcagtcgttgtttcagcggctgaggtggtcgaggtcgtcgtctccgaggcagtcgtagtagcagtcgacgtcgtcgcggccgaggtggagtcgacaccagtcttgcccgatgcggtttcggtgctggcggtggtggagcttccggtgctaggactgttggtgatctcaatccaggtgttcgtcgacgttcccgacgtggtgtccgacgaacccgagcacggtgcattcgccgtgtccgttgcagcgccccatgtaccagtggagccccacgagtcggacgtctcgctagcagcggtcaccgtaccagcctgctcggtcccggtggtaccccaagtgccggtggtggtgctgtcggtgttcgacgtatccgcgccgctggtctgatgcgtcgtgccggtcgaggttgcaccccccgaggtttgctgggtggtcgtgcctgtgctagtagttgtgtcggtcgaggctccccaggtccccgtcgagctctggtcgcccgagcaatgcgtctcggcagaagtcgtatcggtgccagttccccagccggtcgtggccgtcccagtgctggttccatagcctgacgtccctgtcgtctgctgcgaggtggtgtcggtgcccgaggtagtatctgttgaagccccccaagcgcccgtggaggccgtgccggtagcagtaccccatccggacgtcccagtcgtggcagtgtcggcgccagtgctggttccccagcccgaagtccccgtcgtctgctgagacgtagtggtgtcggtcgaggtggtgccagcaccagagactccttgtgtacccgtcgtatccgagtctccgctagcacacggcgtctcggccgagtcggtggtggtgtccgtgctagcaccccacgtgtcggtgccgccagtagtggcagtatccgttccggtgctcgttccccacgtgttggtgccgctggtggttgcagtgtcagccccagtgctggttcctccccaggtgcccgtgccgttggtgatgccggtgctagttgtcgtcccttgcgtagtcgtgtccgctccctgcgtcgtggtgtccgccgaggtagttgaagtcgacggcgaagaagaagcagtcgtcgtgtccgacgaagtggtcgttgtgtcggtcgacggagtggtcgcagtcgtcgagctttgctgggtggccgaatcagccgtggtgctcgcggtcgagtccgtcgcgctggtgtacgagtcgcccgatgacgttgaagtggacacgcccgtgcccgttcctgccgtcttgagattgcgcagcgcgctgttctgtcgaactaccgagttggtggtggcgtccgcgaaagcccccatggccagcgacagcagagcgaggtgcgcgaagatcttgctgaggttcattctgcgagcgtcgagtactgctgaatggggcgagttgatggggcgaatcaagctcaggcgggtgtttgttttgctttgcttgtggaaggctaagcaaaatcgagaatgagtcgagttgactcgctcagcgcaagttcatgggtctaggagcagcctgttccagtgcctccaagttttatccatccttacggcgaatccgttgcaggtgtacagctctaagctccagctctagcgcgagctacaccaagaggcgggtcgagtccgtggtgaacatccttttcagagatgtgctcggaggctgccatctgacgggtgcggcggaagttaaatgccacagcactagctgctagctgctgcagtcttcatgtacgcattgtagcgagctagaggcagcgcgggaagtggacacttcacgcacaaacatgctgcgcgaacgacacggctgggtgaggcaccattatttaatagcatggcagctgtgtcatacagctcacatgtgtgttggtcggcaggaggctcggcttgcagctggccatccgccccgctcacgtcctgctggcgctgctcggccaacatggagctgccggaagcatcgtctcggtgtgtttcgggcgtaaaggaccattgtcttctagaccgaatctttcgctctcgctgtcgtgtcgggtacaagcaggctgctgtgcctgggtattccgactggatcccttgcgtcagagcgcggccaggtcttcgcgcgaactctacatgcgcgagacctgcgcagtcgtagaggcctgcccatggtgcgccacgctgcacttgtacgaaagtatccacgcgctcggatctgtcgggcacatcgtcgaccagcgtaacagtacaatgcaacaacgccgaccatttcggtgcacgaaggcgcgtcttcaacgtagagggcttgagtagatgctgcacagttattgccctttgttgcggtaagatcgagctagaactaaagtcttttcggtatgtcgtgcgctaaatgattttgggcgacgttgtttggaatgcatgcatgcggtttgtgctttttgggaagagcggttcgagggagtgtcccttcatgtattgataacgatcgaggctacagtatgctgaggcagccagggctcgtgagcttctcatcagttgaaatgaggcagctttgtgagctggggctattatggcgctacgaaagtcaccgtaaaggcagcgggcgagaggaaaatccaatgtgaggccacagccgcggggcgctgtttgtgttactgctgtttgctcgaggcactgactggcaacttgctctggttagaagcttttcgacgatgggccagcatctaaaggttacttgtaacactgggtgaacaagtctcaaacgatgcattgggggcgccccaacaatgctgatacagggggggcatccccgtcggaaattagtgatgtcgaggtcgctgaagtctgactcaaattccgagtgcgccgtgtaaaggagtatggccgcgcaactagcggagactggtgtagtcctcggatgggagacagtaagtcgattggtgagttcggcttacccgatttcccacctgcatacttgcgcaccgccagctgatagtcgacttggtctgaagtgccgagaccgctggcgacgcaggcttctcgaccattatctcgggtttgaggtctcgtctccagtgttctcgtgcaggacatgtactgtactcgttgttagtcgcgcgtggcatctggccatgcgtgtcagtgggcaaacttggatactcttcaccgcgcgttcggtttctactgtcgatcgatgcaaactgcatcttgtggcccgacgacccaaaggtgcctgtgcatggcacatcgagagagtgtcgtagtaggcctggcccttcgtgggggcatcgagcttccttcgcatgaataccaaaaggtcattccccaatttaccttgcttcgccgacaagcatcgtgcctccccccagcacctgaacgtgctaccgtacattcacactccatcctcgtcgtcggagaatgaagatcagcaagatcatcgcattcctggccgttgcgtcattgacggtgggctccctcgcggacgcctcggtcgcgcggaagcttggagggggtgggggtgtttcgtcctcgactacgacctcgtcgctctcgagcgacgacacgtacacctcgacgacccaacagagcggtgactcggccacccagcagagcactgcgaccacgacgacgacaaccacaccggccacctcaactacgggatctgcaacccaaagctccaacattcaccagagtggtgtatcggccgacaccccgtgtgcaagtggagactctgacaccgacaacaacaattggactgggagtgtgacagctgcagggcagcagtcgcaatggggaccaaccagcactacccacggcggcgaatcggcggagacgccgtgctcgggcaaccagagctccacgggcacgtgggaccagtcgaccgagaccacctccagctccaagggtgacaagcagcagcaggggcagtcggcccagacgacggtgtcgggctccgttggtgtggacatcacggcgcagggccagcagggccagtcgtctggaaccttgggtcagtcgactaagtcgtctactcagcagggccacacttcgcggagttctgtgtcggcctctattggtgtcagcatttccggaaaaggtggtaactcagtagagactccgtgttccgaagaccagagctccaccggcacggggggccagttgacgaaatcttcaagcggccaaggccatggttcgaccggcactcaggggcagtcggcgcagacctctattaagaccagtggcaagaagcaacggcagtggggagcgtcggttgggacctccgtgtcaggctcgattggtgcgaacgtatcgggtcaaggcggtgacgctgcagaaatcccgtgctctggtgaccaaagttcgacaggtgcgacttcatcctggactaccccggactacaagcacggtgtgttagccggctcggtctcagcgaccactgagactctctccgcggattccaccagccctggtgctactaagaccgctgctccgacaacaacctcgaccccggcgaccaccagtgctaccaaggcaggcaaactggagtctcggccaagacggcgtcagctacttcgtccggcacctcgtcggctgactcgtacgcggactcgactacgcagcaatcggccacccagtcccgtcgtgcacttcgcactaaacacacttctcgttggaaaggaggtggagccattttgcggcgtggcgatagtatgaagtacttctgctgaactgcgccgtcgttgcatatagtactactataatttttgaattgaaaagtgttttagtcacaaaccccgcagaagcggcttcaacccgcgtgcagtccaatggcgacataacatatctagagccacttcttcagagccgacagtacttcagcgatgtaatggcggtccttgacggtcgccttcgccccaaactctgttacaaaccaacgggcatttgaggtgggaaaagtaaacgcaatggcgtatcgatcgatagagggcagtgagaaataatcgccgcagttgtcgctgcggaaacataagagtcctgaatgctccattatatgtgatgtatcctaggctaggatccctagtcttgtcgaacgatcgactgtttcggccaagctcactaactaacacgtccggcacctgccaagtaccttctctcctgcttgatggcggcaatcgctgttgcatcgactgatgaccagccagtagttaccagtgaaaatgctccattcccggatacagtaccttttgattgtcctttcaccaaaaatgcactgtacttgaagtgcaacagatggcgatcttataccgttgtaatgacgcttgcaacaagacggctgtgaccctagtcgaacttctggtcaacattcgattgactgtactgtagtcttgacgaacgtaataagcacctgaggtgtcgctatgaccctatgcccctagaaattatagagcgctattgtactctcataggaggtaacttccaattcgtagcgtacaccaagtgcctcatcgcggtcgtggcgagtgagtgccccattcgatctcattttcacttttgctccgcagtcaccaccactgcggcaagtagctcttcctgtcaacgtccagtccacgtaccaagtctacgtcctctctgtcctaaaatgaacctcatcaagaccatcgcgcacctcgccgtcattgcggccgctgtgggctcactcgcggaggctggaaacatcaaccacaagcccacgcaacccggtgtctccaacgacgacgcgttcgtcactccaactccggcgacgagcactccaactgtcacccccgttccgaccactgctgctcctagtgcgactgaggccccggtggcgactcgtgttccagcaattccagcgccgacaccttgcgcaactcctgtccagtcgacggattcagcgggcgcaagctctgcgcccgtgccagccgaccctactaacgaaaatcaggacggatcaaaactcggccacgactcgcccaccaacaaaaaaaacaacagcgcagctcacgacgacaagcctgccttggcaaccaaagatgaaggtgaacgtggtgggtccagcacaaccaccagcgccagcggggttcatgctaaagcaccaagcagtgtcacgcctacgaaaaatgtcgtggcaaaggccgaagccggccttgatgccaatgccggattaaacgcaggcaccggcctcggagccaacaccgacttgaacgcaggagctggcctcaacgctggagcgggcctccgcgcgggtgcagggctcaatgccggtgccggcttgaacgctggagctgggcttggagccaacgcagggctgcacgctggagctgggcttggagccaacgccggcttgaacgctggagctggcctcaacgctggagcaggactcaatgccggtgccggcttgaacgctggagctggtcttggagccaacgcagggctgcacgctggagctgggcttggagccaacgccggcttgaacgctggagctggcctcaacgctggagcgggcctccgcgcgggtgcagggctcaatgccggtgccggcttgaacgctggagctgggcttggagccaacgcagggctgcacgctggagctgggcttggagccaacgcagggctgcacgctggagctgggcttggagccaacgccggcttgaacgctggagctggcctcaacgctggagcgggcctccgcgcgggtgcagggctcaatgccggtgccggcttgaacgctggagctgggcttggagccaacgcagggctgcacgctggagctgggctcggagccaacgccggattgaacgctggagctggcctcaacgctggagcagggctcaatgccggtgccggcttgaacgctggagctgggcttggagccaacgcagggctgcacgctggagctgggcttggagccaacgccggcttgaacgctggagctggcctcaacgctggagcgggcctccgcgcgggtgcagggctcaatgccggtgccggcttgaacgctggagctgggcttggagccaacgcagggctgcacgctggagctgggcttggagccaacgccggcttgaacgctggagctggcctcaacgctggagcgggcctccgcgcgggtgcagggctcaatgccggtgccggcttgaacgctggagctgggcttggagccaacgcagggctgcacgctggagctgggcttggagccaacgccggcttgaacgctggagctggcctcaacgctggagcaggactcaatgccggtgccggcttgaacgctggagctgggcttggagccaacgcagggctgcacgctggagctgggcttggagccaacgccggattgaacgctggagctggcctcaacgctggagcgggcctccgcgcgggtgcagggctcaatgccggtgccggcttgaacgctggagctgggcttggagccaacgcagggctgcacgctggagctgggcttggagccaacgcagggctgcacgctagagctgggcttggagccaacgccggattgaacgctggagctggcctcaacgctggagcgggcctccgcgcgggtgcagggctcaatgccggtgccggcttgaacgctggagctgggcttggagccaacgcagggctgcacgctggagctgggcttggagccaacgcagggctgcacgctggagctgggcttggagccaacgccggattgaacgctggagctggcctcaacgctggagcgggcctccgcgcgggtgcagggctcaatgccggtgccggcttgaacgctggagctgggcttggagccaacgcagggctgcacgctggagctgggcttggagccaacgccggcttgaacgctggagctggcctcaacgctggagcgggcctccgcgcgggtgcagggctcaatgccggtgccggcttgaacgctggagctgggcttggtgccaacgcagggctgcacgctggagctgggcttggagccaacgccggcttgaacgctggagctggcctcaacgctggagcaggactcaatgccggtgccggcttgaacgctggagctgggcttggagccaacgcagggctgcacgctggagctgggcttggagccaacgccggcttgaacgctggagctggcctcaacgctggagcgggcctccgcgcgggtgcagggctcaatgccggtgccggcttgaacgctggagctgggcttggagccaacgcagggctgcacgctggagctgggcttggagccaacgcagggctgcacgctggagctgggcttggagccaacgccggattgaacgctggagctggcctcaacgctggagcgggcctccgcgcgggtgcagggctcaatgccggtgccggcttgaacgctggagctgggcttggagccaacgcagggctgcacgctggagctgggcttggagccaacgcagggctgcacgctggagctgggcttggagccaacgccggattgaacgctggagctggcctcaacgctggagcgggcctccgcgcgggtgcagggctcaatgccggtgccggcttgaacgctggagctgggcttggagccaacgcagggctgcacgctggagctgggcttggagccaacgcagggctgcacgctggagctgggcttggagccaacgccggattgaacgctggagctggcctcaacgctggagctggcctcaacgctggaggagggctcaatgccggtgccggcttgaacgctggagctggcctcaacgctggagctggcctcaacgctggagcagggctcaatgccggtgccggcttgaacgctggagctgggcttggagccaacgcagggctggacgctggagctgggcttggagccaacgccggcttgaacgctggagctggcctcaacgctggagcgggcctccgcgcgggtgcagggctcaatgccggtgccggcttgaacgctggagctgggcttggagccaacgcagggctggacgctggagctgggctcggagccaacgccggattgaacgctggagctgggcttggagccaacgcagggctgcacgctggagctgggcttggagccaacgcagggctgcacgctggagctgggcttggagccaacgccggcttgaacgctggagctgggcttggagccaacgcagggctgcacgctggagctgggcttggagccaacgccggattgaacgctggagctgggcttggagccaacgcccacttgcgcgcgggggctggcctaagggcaaacgctgatgctaacggtggcgcgcaaggtggtgtcggtgctagtgcttaagcatccgctgccgaagcagtgcggaggattcggttaatagtcatgaatatgagagctgttcttcttggttgaatcttctgattgtcaaaggtttgttcattgcattaacctttgagcttctctatggtgactcaacagcaagcgactatacacagagctctacataccgactatcgactggcgtgtaggtcgtctatatctaacacacttacagtgatttataatccctggcagcactgggctcaactggctcagagccactcgcacagtctcgcatattctacttagacactagctgctgctgctgctgcggcatgccgttttcggttcgctgcttgtagaacttagtacgtgtagttcaagttttgtttttcaagtcggccaccgagatcttttcgtccagcaccaagttctaggctttcatcagcttgtagtctgccacgggtcacggccgtttacgaccgtttggtccctgcatttgaactctcttctctgctgacgtccactaaaacgtcactcgcctactgtgcagtgcgcttggtcgctgttgacgatctttttactcaggtaccaagggcacaaaagcgcaccgcgaaatggcgaggacaaaactgcttacctaaagcccaaagaggtaccgatacgaacatgcaagcaacgtctatactgtgccctacaagtacgtaaactgcagtcaagcagccaatgtatttttgcgcgtacacgtatccatgagagaaaatcatggcttatcacgctaggctggaaaggaaagacacgagcacccatgcagctaaaatgattgataacaaggacgaagttcttgaggaagttgctggtcgaggcaccaaaattggtagaacttgctgccaccgtcgaagtcaacaacggtacctaagtattagatgtcgttaagacagtcgttgggcgtggttgagtccattgtgactgtagttcaatactaagtatagctccagaaatgcgcctgccaggcttcagtcgtggccttggccgagtcagtgaagcttggcatgatcgtcggggtcgacgattttcactaaacggcttggaccttcaaaaccatgggttagcaattttaaggcggatagatttatcgcttcaaccagaagccgaacactttcgttcagcaacaatccgctggtcgcgtgtctgttgcggcgggtggtgaccagcttatttgccgaccgcgctctagcacagtttgcgccgccggcgctggatgcagaccaagaagatgttccacatggtggcagggttgatcttatgataccgttgtcatgacgtacatgcgctggtcaacatttgaatgactttcttttcttttaagcttatctgtataataagcctccgaaagagccgcctacactagaaaacatgctggagtgctgtcgtgcttccggtagaggaggtgactgtgtggctccttaatgaggcacctccagttcggacaccaagtgcctgcggagagtcaccgccccaagagatgaaaacaaagtcattttcatttttgctccgcacttacaagtaccgctgcatgtagtttccctctcaacgtctagtccaagtttccgtccagtcctcagtgtctttgtcaacaatgaacctcaccaagatcatcgctcacctcgccatcatcgcggccaccatgagctcgcttaccgaagccggcaacatcagccagcaagcaccgcaaaccggcgtctccagcgatgattcgttcacgacacccgtcccagcaaccgatacccgatcgtcaccccggttccgacgactactgccccaagcaccgcggatgccgccatgcaggcaactcctgttcctgcggctgctactccacccccaactccttgtgcgacgccgtctccgacgacaaacgcagcaggtgaaaacactacaccgagcccagcccagccgtcggacaagaaaaatgattcgtccaacaattcacctgcaacgaaccaagacgatgccaacagctcaggccacgacaacaaaacggtcccctcgactaaacctggtctatcgacagaagaacgcacgacaagtggtgctgctaccacagcaagcgctagtatcggcggagctgctcacggtggcgttgccggcggagtcggtgccggtgcaggtgtcggcggccgtgtaggaggtggcgttgccggtggagctggagtcggcggtcacgtcggcggtggcgttgctggcggggtcggtgcaggagctggtgtcggcggagctgctcacggtggcgttgccggcggagtcggtgccggtgcaggtgtcggcggccgtgtaggaggtggcgttgccggtgaagctggagtcggcggtcacgtcggcggtgggagctggtgtcggcggagctgctcacggtggcgttgccggcggagtcggtgccggtgcaggtgtcggcggccgtgtaggaggtggcgttgccggtgaagctggagtcggcggtcacgtcggcggtggcgttgctggcggggtcggtgcaggagctggtgtcggcggagctgctcacggtggcgttgccagcggagtttgagcttgatggtacaccatttggtatttgttgtagcaacaatggtggtaaaacgatatcaatgtaaagttgacgaccgctttgatctacttgttagggctgctaatggtaaaaaggtatacctttcgttaagtaggttgctacgttatcagctgtccgtctggttgtattgtcaatttcattgaatatggacgagcaagcagtatggccctgcctgaccacgacccatgcagtagtggctcttgctttaaatgcgtagctgatactggcccgcacgcgtgacgtagcgaacccacttcgtcgtcgggtaggagctcttctcgaaaaccttgaggaaccgcacgtgcagtcccgacgacgtgaacatgggcacctggaactcgatctggaggggtgggcgcgaccacagcttctcttttgtgcccttcatcatttcgacctctgcgtccagcatccgctccagtttaccctggaacttgcgaatacgccacacgatcgcgtggttttcgggctcgtgcttcgccctgccgatgggaacgttaatccgagctcgggcagtgttcggaggtgtctgcaacgccgaaagataagcaagacactaagtaagcaacagctcggaaactcaagaaaatatctcactgcgcaccgggattttgatgacgacgttggtggcaaacatccgcgggctgaaaagtgaggccagcttcagcgtcaccgagagtcgagtcgtgccctgctcctggtacgccggcatgatcttgaagggcaggttgatattctccgtcacgcggtacttcatgagctcgaactctccgtccggcgggatgaaagtgatggtacgatcggcgtcgaacttgccgagacgcacgcagcggtggaaggtgcagtcgtcgatctcgacctcacgagagccgcgcttttgacccgccaccttggcggagggggcgtcacccttctgcatcgtgagtttgtcgttgagtccgagcttgcactcgggcatgcccgtcagtagcgtcttcatgaccacttggcccgccacttcgttgcgcagcaccgtgcccgtcgaggacatgagcaagttgacgctctcaaacacgtccaggtacacttcgttcctcttgtaccggataccctcacgacgccagtcgatagcgccggtgatttgggacgtcaactgcgagggaggagctccaccggggttctccggggtctgaaagacaacagatagaaagtcataaagaagaacaaggaacgtaatctaaagtaataaagcaaaggaggacataccgccagagaggacccgaggttgataaacagcttgagcacgtcgctggagcagttctgcgggtagccgtggtccatggtctcgtccagcagctcgtacacgagcgtgaagttgtctcggatggtctcctcgttgtacttcttgccaaaatactctttgaagatgacgttgagctggtagaggaactggaagaccagcgcggcgttgatgttggcgcgcgagacggccacgaggtacaagttttcgtggcgcgtgtagaggaacgagcagccgtcgatgaccttgacgggcggcagcgtgcccgtctccttggccgcgatcacctgcagccggaagttgtcagccgcgcgtcgactcacatcgtcgcggtagaaccggttgagcacgacctcgcccttctggctgatgaggaacagcgcgctgatcatggcgaactagcgatcgagagtcgagagatcttcggtctagcagcgcagtacgtaggtaggtaggtaggtaggtaggtaggtaggtaggaccgagggcttatctgctccacgccgcgcttccaggactgatgcgaccggtcgagaagagaaatcctccgctccttgtaacgacccgactcgggctcgcgtcgcttcgcggcattttgtgtagcggtggtgttcacacacgcaggccgatcgctattatggcgccttgccagtgcactacggtgtgaagctcgcgtccacattgtcgtcggaccagggtgtggccattaacatctactgcaggtcaccaacgagcttggcgtgaacctgaacgacgaccgtaccggcaacaaagacacatccacaacactagagaagtagtacgtacattaatatgagcgctctttgtctgtttcaccagcttaaaagttgtatttctcccattcggagacaccacgcaggtcctgctatattcattggggcggtccgactcctgctgctgtctctggctgtcgctttctgcttcaataatctagcgatggcgccttgggggtgtgctgggcaacgaacctgacgcgttgatgccgttgggatcgtcgtcgtcgaggtagtttccgtccgggatgggttcgtagccgtccttggagttctctgcgtcgtccgagctcttcccccacagcgtgtacagcaggaaatacagcacgaagatctccacgaggtgcttggacgccacaaagagccaccaccacttggactcgaggtaggctccggcctggtggaaatgtgcgaggctgatgatcgagtaggtgaggaagacgcagttggagacgaggaagaacgcgcagatggacgtggcccagttgaccgccttgatcctttcggtggtgtcgatctggctcacctcgaggaacgcctgcagcacggtcttcatcctgaacgagtacacgagcaccgccgcgagcgagccgagcgacagcagacacatgacgacgtcgtcgtagaccatgagccagtacgagtcctcccgcttggccgcgaacaccgcgaagcccatggcctcgatggccacgatggccagcagcacgaagaagaagagccgcagcgggtgcgaccgcacgctctcgtgcgtgaagagccggcgcagcatgtcggcccagaagacgacgatgagcacgaagacgctgtagagcaggaaggagcccagcagctccacggcctcggccagcaggaactgggcccagccgtcgtcgcccatcatgatccgcgggggctccaccagcaccgactgcacgccgtagggcgtggcgaaccacagcacgcgcgtgagcgaggccagccccatgagcaggtagaagccgagcgtcgcggcctggcgcgtgggcgactgcgcgtgcatggcgaaggcccagaaggagaagaagcaggcgccgccataggccagcgccagcactgtgtccacctggcggtagcggaactcgaggtggatcagcggcgctgcgagcgcatggatacaaacagagagagggagagagagcgtgagcaggtagagcgggtagagcaggtagagcgctgctaggtgagaggtgggggagcgcaccgtgggtgccgtcgtccagcggcaggcccggcgcgctggcgtccgtcatgaagcgcaacgattaaggttttgtaggttagttagtagagtggcgcagtgtatccgaattgcgtcgtgaaactcaggatgaagttcgaaaatgtggcatacacaggtggtacactgtaccaatcaaacgtggtgttgtggcagcttcaactttagcctggaggtttgcagttgatcacaacgcagagtggagagagatccaatcgatagaaatggctgcgatgcgagagaatgagaggatcgtgtcagtctttgtgaggagatgttattgatgggggcactaggctgcagattgcgccgcgcagcttcacaatcacagcatttgtggcactatcgacgtcggagggaggttgttccggttgtcggggctgtacccgttggtaggttcgttcctggcggttgctttagcggtggtggaggccagtagctcggcgacaacagcggcaatgatgaaaatcttgcctgtctttatctggcgtcgttgacttgctgtccacttgctctcgataagaagtaaagaaaaattagccgactagcgacaacagtcggctgtgaaaagtaaactatattgtctcgtcagctagtgaaaacaatatgtccttcaagtattcatgagatggcgtgaagcgctggttggacagagcgctagcccgtatccatatgtgtgatgcgtattgttcagcatcttgctaggtaagcgcacactggtttcaactcggcgtacagggaaatattagggacatatcgaacaacttgctgataacttatgagaagcatacgcaaaagagagatgctgacttctgaggcaacaacttgttgcctcagaagttgccaacaacaccttaaacgggctcgacgtaaaacattgagtccttgctcacattgtggtgcatcttggcagttggagaccctagcattcctttcggaagtcgttgcgctatgagtagccgacgattctcctgcaaagtaagcacaaccgaacacttgtcagccagctcgagctacaaaacagcccagacagcatcctacctcttcgaaagcttgctcaaagtgggcatggcggtgcaaagccttagcggccaggcgcatggtctcgtgctgctcagtaactttttgttgatgctgcgagaatgcctctatccgattgatatgcaccagcaagattcgcgacttggcttctgctcgtcgctgctttcgcgccttgtcgaattcaaaagatagacgatctccttctgcagcaacacaaaatagcgatacatcagtaagatggagcgataaacagctaggaacaaaccgttaccttgagtgaaaggtgcttctcgacttggtctgttgtttgtaagaggtggaagggcgtctctagggctgctgcgcatggttcctgtagatgttcttcgggtagattccatgtctatcgctgcaaccttttcgatgagttgtgcagcgtgcgttcggacacgattaatgtagctctcctggtagaatatcgttgggtcctgccccggttggctgggtcgttcatcaggcagccgaaggtgcctgacaaactcgcgatagggtactttagcgccctcatccagcagttgaagatcaaactcggtcaaaagtgagcgagcttgttgttcgtccagcccgaagttgggagcttgcagtgcttggatcaactgcttcgaggtgatgaccccagctcctccagggtcgcgcgacttgagcgccgccagcagcaccgatttcttggacccaaatccgatgggactggtgtaccagtgctcgtttttgtaggatttcgatgcagtttcgtgtgcgtcaatcgagtccccgagcacgagctgcaggaaaacacaacgaaaacacaacaaataaccagcaatagacttaatcaccgccaattgcacactagtccgactcaacgccgtgcaaattacctttgcttgctcgtgttcagctagctgagcgtctcgtggcgacagcttgcgcttggtcctgcattgtcctgcgtgggtggccgtttttccggtcgacgaggagatcagaggcagcttgaacttctcgtgccgcgtcggcttgagcttcaccgcgcgggggcgctggtccattgtatcgttatcacatgtcgagcgtctgggcgcttttgcgtcttgagttgccgcttgcttggtgcctctggggcccggcagatggtgtgctcctgcgcgggcctcacagtggtgggtgagcacaggcaggttcgtgctgcccatgacagctcgtcgctgtcgccccatggtctgccccacaaaccggcgcaagctggtctcggcaggtgccacctccacgtgaaattccagacccgacgcgccttccgacgtctgacgcggctgggtttaacgcgatacgcgtggcgccacgcagacgccgcctggaatttcgcgcttcgcaaccgactgcaatatgctccgcccgatgcggccgcgagtcaagctggggctgcgaccacatgttgaacctgttcctgaggaaggtcggaagagcttatcgcatggatggctacattgggatgggcgcaagatgtggaggacgcaatagaaacagatttagccctcagcgagttagcggagacttgctactagttagtattgccgcttgcaaatactttgccctctaaaatagacctctaaaatagaccacgcctgtctcttaatatgagtggacacgagataggcgagggatgatttagctttatgctttggtgggggccgcttttaggcccagaaactcggtttggcccgtctagaatggcatttctgcgtttccaagtcgtagcaaagcgtgaaacagaccccaaccttgcatcttagacctgtactggcgagatatataaatcagacctaggtctcaattaagagcttgctaaactaaaatcgagattattaacgagataataagcatgcgttggccaaaatatctgcaaacggcaataccactggtctgactagctaagagttcagcaccgacatggctacaaagtgcaagccggcaccgttacatgcatgtataccagcgaggacttgcacacgcacacgctgacgctggcgcgggtgttctcaggcagcgacaatggttgaagcggattgctcctggtgcgcgtcggtcggcgtcgactgtccgcgctctggccggtgttcaactcgacgcaaatctggtggttgcagctcgcagagcagcgcgaaccgcggcatctcggctctgcaccgaggtgacagatccgggtctgtaggagacgcccgcgctggtccactctgtgtgggtctctgcgcgcttggcccctccccgcgcctccgtctctcttctagcgcggtcggcgcgagcttgcttgccggggtacggtatcctcgcgaaccgccgagatgatgagggccttcccaacgggggaaaatactgcggcgccgtctcgttactcgcgcccacgtgcgtctgtatagggccgctcttcctccgtgacatcggctttcccagctggacggcaatttggccgcaaagggccaaacaagcgctgttttgagagactaggacgcgataataatgcagtaacgacggcgacacccagccagggctgccgtctcacccacaggttgcagacggtggccgcgaaccggcccagccgcgctcgtcgaggggcgtggcagctcgggcggcacaattttcccgagtcctgtgtcgcaggaccaggaccagaagcagcaacccccgccacggcgcgacggccggcagacgagaagtccacagtacagagtgcagcaaaacactttgccgtttgtatggctcactcacacccagcggcgctggcctccgaatttgcgctaaaagcccccaagcggagacttcagaattgagccgcaggccgctgattggctcgctccgcactcactcgcgctcagtatgctggcgcgtgcagcgccggggcgcgagagagcagcaagcgattgggcgagccagtcggcgaactgacttctacctgggcggagcggcatccgacgaccgcaccactttggcagagaccgcgaagcgcacaagaagcgagggaacgctcagcgaatcgcttgctcggcttgtcgagagaaaccgcttcgagggcttgtggcggcaacagcagcaggcaccagagcgccagagcagcagcagatctgacgcgacttgccaacgctccacctcctcctccgcagcagcagcatcagacgaatgaatcaccgcaccccctcgtcggggccttcgcgccgcggcggcggcctcagccgcaacggactgagcatcccgggacttaacgtggacatcgagatgctcgtgcagagcacgcagggctcggccatgcacttcggccgcaagacagcgggcgagaagttccacggctggctctggaagaagtccggccgcttctctaagtggcgcaatcagcacttcgtgctggacggcgcgctgctgacctactacgatacgttccccacggatcagttcgtctccgagtcgtcgctcatgccgatcgcgggcgacaacctgttcacgaccaagagcgagtccacccccgccggcgcagtgcgggtagcgcacgtggagacgtcgcagaagtccaagattgccttcaaagtgtacgccgtgagcggcaagatcatcgatgttcgcgccaagaacgagacgctgtgcaggcagtgggtggaccgactgaacgaggcggctgcgctcgccaagcgacaggagtctctcaacaccagcactactagcacggcgtcatcgacgctgtcagcaggttactcggattcggagctggacttgcagtgcaatatcgtggacaagagtggctggctcgaggtgggcgaccgcaagtcaaagcgagcaaggttctgcgtcatgcagggcaacatgtttacggtgtacgacacggaggacgcatgggcggttccgctcagccgagcgtacgtgacccacgccgagaaaatcagcgaggccacctgcgagttctccgtgtccacgtgtgctggaaaaatcactaagacgcttatggtcaaggcgaaatcgcatgacgagatgcacctgtggatggaggcgctgagcaatgcgttcgagtagggtcgcagcgtcgcagcttccgagtgcatcgccattttgatttcattccccactccccaccgcgatcaagcgacccgcggtacctagcgtagtagatgtgacggcccacgccgagcgccatgttctccggttcaagccaagcaccagctcgacttttatcatcgctgccacccccaacttccagcgcgtgtgttcaaattggcgcgaggggcggcgagcgtgtgcggcgtatttaagttattcaccggcccgactgagaccggcaagttagtagtaagcgttttgtcgagaccacgtagtccacgtgcagccgattggaagttgcatacagttaatcaagcaaacacgcgatcttcatccgttaaaagactgcgttagatgcaaaggctttctcgccgaagcggagtgatagaggctcattcacgacatcaccatttggcgtcgtcaatgaagcctcaagtgaacaactcgtgagattcgacgcgttgcactaaagagcgttacattgcattgccaaaccgtaggtatctaagcgctccacagcctcctttgccagtgcagaccggtcattccgaacttacgtagcgtagcgcctcagtcaaaggatggagtgtagtgctaaccacagttttcaatcacgcaaccgactgctccgcacttatatttcgtgctctcgcggcagcgaacccacgaatccccccacgaagtacatgtaacgcgcactaacaacggcacagcagggcacgtcgccacgatgctcagattgacggtgtttcttggagtcagactttcgccaggaagaccgcaatctcgaagtgcacttcaactcgttgctgttcaaagacaccggcaccttctcaactcctaaaggctcggtaagttaataagattcattacacatacctggaaacgcatccaggttcaccgctactaatagcggtttttgaaacacgatcgcacctccatctgcgcctcgtaagaagcttagtcatcgtcatgaccccgcataaggtcctgcagtccgcggcgattgagtcgctggtgttgctgcatgagcaccagccggtgcttatcgctgacgacatccgtggagttctggtcaagcagctcctgacgcacctcatgctgcagcgcgtagagaatttccgtcatcttcggtcgccgcttggggtcatcgtccaggcagcgcgtgataagctcgcgacggcagggtgagcaggacggaggaatggttggccgcaagtccccacgtgacacgcccatcatgatgtcgatcgtcgtgtagtctttagggaggtcatggtagggctcacgccgagtttcaagctccacgaggatgacgccaaagctgtagcagtccacctgcgtgtcgtaccgttcctcgcgtaaaatctcgggcgccaaccagtacggcgtgcctacgatcgtactaaacagcttgcccggcagcaactgtcgcttggactcgccgaaatcagatactttgcacgaatacgtgcgtgtgcacaacaagttggaagacttgagatcgcgatgcaccaacggaggatcacagttgtgcaaataggagacgccctgagccacatctgtggctatcttcagcagcgggtcactccaggtcagcgcgatggggctactacgcagcagcgttaggacgtcgccacgctccagatactccatcacgaggcctacgttcgataggttgtcgaaggtggcgccaataaacagcacaatgttaggatggcgtaagcatgccagcaactccaccttgctcttgaatgctgcaagaccctcggctgttaagcacgactgtgccaaccgcttcaccacgacatccgtctgatggtactcacccaccaatacttctccgtttggtgtcttggccaaaatctccttcaactttaggtctgcaaacgggatggacaccgtcatgaacagctccatatcgcctgtcgcgctcagggctcgctccaacgcctccttttcatcgcgggtcatcgtattacggttctccagtccaatctgcttcacggacaaatccagcttcagcgttgtgttaatgcgctcggcacgcactttagaggcatacgccattcgagcagcacgatcctccgagtacgtggctgtgagcgcgaagcatgtgggtaggaacacacacaagaagaacaggaacgcctcgttactcatcacgcgcctgctggatgaaatcagtggcgtcgctcccaagaaacacaacatcagcgtcgtgatccactccgccaccgacaagagcagcacgtgcgtaaagtccaacttcatcgccaccgccacaataccagcaaacgcggccagtatagcaagcacacccataagcaacgagtacgctagcttgctatcgtatagctgcaaccacgataacaacatcatttccccgcccgctcccgatatcttgccccactccgacgtatcataccacgatgtcggcatcaccgtatcgtacgcgcagaccatcccgttccccagactctgctgcaagttcttcctcatgcccactagctcgtgatgtacaaacaccgccagccctactgaccagcacaacacaattaacgaggcaatcaccttccaatgccgtcggatgtagtacactccaatcctcaatctcatacttccttcaaagtatttcagtggcagcatgccataaatcacagcaaagggcgcaaagctccacagtagccacgtgagtccttcgtccttggacatgggttcaatgaacgagacgcagctcgtgtcggagacgttggaacctcccgaaggttcctcctctaacaactgcgagagcagatccacccactcgtagtcgtttcccgaaggtgcaatgcacgtgtccttgaaccttcggaacaggaaataagccgcgccttcgaaggccacgagagccagcatgagtcgccgcgccacggggaagtccaccgtggaggagtagagctggtacgactcctccatcctctcgtcccggaagtggttgctcagcagcttcaggtccacgcgcgggtccatgtgagcttgccacgtggctgacccctgagccgagagcagttgcaccccactgggcgtgcgcgaggcctgctgcgaggcttctccatccctggaagacgcggaagaactgtgcgacgaagactcggacgagctcgacgaagagcggaggcgcgtgtgcgtgttctgagtgtcggaccgcccgtccggggttgtcacttggctgtaggcgctgctgccgctgtcctggtccaagtccgagccctccagcacgtccagacgccgctccatgtgcgacgtcttcattacaatattgagctcgaaaacaatgtgattaattttgtggcctagtgagcaaaatttagtgtcggaccaaaaaatactctctcccaaaaaccacttggagaatgtaacggcggctactcgcatcaatccaagctttgggcgtcgaggggctacgtacgctacgcatctacctgcaggcgcgccaccgctccagctcgacacacagccatgaaccacacgcgcccgatccccataggaggaagcggcagccagcgcggctcccccgtgacgcgcagccccaacggcgccgcgctcgtggcgcactcgctgcccgcggacatgcaccacgtgcacctgtcgcgcttcatgacgagctccagcggcgccagatccggcgggctgcagccgcccagagcgccgcaggtgggctccatgcccgagccgagcttcctggagctggacggcatgcccgacctggcgctgggcccgccggcagagaccatccgcgaagactcaccgcctcgagccccggccgtgatccaggtacacttttttcagtggggttcaatgggtttggtgctgtgttttaatgagttttgcattggtttgtattgatgctgttgcagtttgctagctcgtgcccgggggatattggcttcttgaggagcaaccctgctaggggctcgtggacgccgtcgctgcacccgtacccggacgagcacgacgacttcgatctgtccaagagtccggcgctggcagctatgtcggcgctgagagagaggatgccgcccggcgggttcggaggggagtcgtcaactacacagcaagcgggcaacggctcgtcgcacaggtcttttagcgcgcgcgcggcaggaacacagccctcaaggcattactacgcctcggacgaatcgtcgagctacgcagtgagtgcggagctgctggagaggctgagtatcacgtcggaggaggaaggagagggcgcagaggaccgcgagcagcgctatcggatgccaggatacaactcgcagatgccagcagatcagagacggcgggccgagcggcgcggctcgtatggcaatgtgtcggataccggcgacacgggcatctttgaattcgacgaccaatagactcggcaggcaatgcgatgattaagcagcaaaaaatgacagacaagcgaaagacaggtgccagcgctcaagtcacaggtggcttatgtacgcgatgacaggacggacagaggaaggaagccgctggacttcccaagaagcaagatacggcaaagctacccagacgcaacaggatgacggcaagaagagcgtcaaactgctccatcgcccacatatatttgtaaggaactgcgtggccagcaactcatggcaatggtcgaaacgcgccaccaactagcaagcttgagagcgccgccgctcctcaagcttgttcatgtagacgcagcttagcgtaccacgatcgctatacactcaatgcacgcatcgtttctttgaactcgagcagcgctcctccctgctcgaccagcgaaaaaccgttatcgaggtcagcgtctccgtttgactcacttggcaaaatccaccgccgcgaaagcaacgcagcgcttctcattctcttggggtggatagtacgccggaatcaatgcgggtcggcaacttgtggcctgcatgcgtcgttgcttgcaaggacaacagagcaacggaatacagtacagtacacgtattatacatgcagcggatcccttcgttgctgccaaccggctagtggcggtctccaccgcctcgtctggctcaggcaggcaatcagcctgacaccagcagcactgggcgtctcctgcgaacactgtaaaacaccgagtgtattggacgcccgccatgtgcagtggattttgtccatgtctcgcattgaagacgtcggggtgtggcccacaccagtccacacaaaaagaacccttcaaggtgaggcggggcgacgccgtagtttcaaccgctcttgccccccagcaggagggccgacacgttcttccgtctgcgtgtcaacgtgtcgtctggtcgggctcaaaatgcacccagctgcggtagcggggcgggcaatcatcgcgcagtcaatacgtgtgcaggtaatataatacatgtagtcagctcgcatcactcagttcctaattcaccgacggactaaaatcacgattccgccagcacttccgaccatgctgctagtcgacacgaagcgcgagctgccactaatacacgccacgccggtcgtgcagctcgccaagtcctgcccaacacagcaaccaccgccaccatcacaacaacaagaagaagaagatgaagatgatgctgcagcaatccccgtcgccgccgagcgctgggggcagctctgcgcccgcatgggccaattgacgcgcggcatgaagcgctgcagacgccgcagcgccgacggagagacggacttactgtgcggggcctccatgctgcacaaggacttctggctggaggcgctggacgagcagcaccgctacggcttcaacctgcgcgcgttccacaaggcctggaagcacgagatggccgaggaatctcgcaacaacaacagcagtgaagacgcgtcgttcttccactggctcgaccacggcaacggcagcaaactggagctgccggagtgcagtcagcaggcactgcggtcgactcacgtggagtactgtacggcggaacaacgcaagaagtatgagctcgagtttgtatccaatggagacgacggagatgtgagggttcaatacgcggcatcgggacgcgtggtgctcaccgacgagcgcagcaagtggatcttcgtcgtggacctggtggggcgcatgtacctcggacgcaagcgcaagggccgcttccaccactcgagcttcgtgtcgggggcgcccatcttggcagcaggcaagatcatcatcaagaacggcgtcatactcgccattgagccgcacagtggccacttcaagccgcgactagagaacctcctgtcgctctgctccatactggctaagcacggcgtggatatcgacgatattgccttcatcaagcccaagaagtggacctgcgagtggcccttcccgccgcagctagacctcgagctcgaggactttgctggcgcatccgatacggactatggcgcggacaaatcggactcggaggggccacggacgcgtagggtagaaaggaaatagctgttctaggatgtagcgttggtatttatcgcggatcaggcgtctcgaataaatgtcctccttcgaagtattaaccaggttgagtgcagtcttctaccgccgcttgtactcgcacgccttgaactcgatcggacccaccttctgtggcttgcgggacgacttgacaaactcgaacagcacgaacatcttgttgcgctcgtccttatgcttgcagtcgaagcccatcttacgcagcgtctgcacgaacccctcgatgccgcccagcgactcgctctcaaagcgactcttgacctccgcgaccttcaacacaccgccgggcttcagcacgcggtacacctcgcgcacatactcgcgaacactcgtccccataagcgccaggcaatacacggcgatatcgactcggctgtccttcaacgggacctgatccacatccagcaaccacgtatcagccacagcattcctcaacacaacactatcaacatcaactcacatcagcaatattacaggcagtaacgtgcgacttgcgggacaccagatcgaacgagtgcaccttgttcgacacgctctccgccagtctggcgtctccgcagccgaaatccgccaccaccgccttcggatgacgtctacaaccagaaaaaaccataaaaatttacgttaaaaatgaactgcaataccatcaccattgggttgttgaggccacgcacttgacgtagtcgatgaaggtgtcgagcgggttggtgggccacttgtccgccatctcccggaagccctggtggtacacgtcgaagagctccgggtcgctctggaacgtggagaaggcggagtcgcccgtggttgtgtacagctgctcgttgagcatgcggaacttgccgccgtcaatcttgcggcgcatctcggccaggcgctcggcgggggtcaaaggcttcgacttggtcttggacttggctttgccctgattctgctgcgacttcggcacggccgcgacctgctgcgccttgtgcttctggttcaccttcttgctgccgccggccgaggctggcttgcccttggtgccgcccttagcgccgcccttgcgacccttcttgcccatggtctccgatagctgctggacgagaggaatggcaacaatgaaaatctcgctctgaccaatcaaagtggagaattactttgaccaatggaagcgcgctaagaagttggtgtggaggtgtgtgcaagttgaagtgaacggttttcagtccgatttgccttaataatgcctcacgcatgcacactatgcattgcacacaatacacgtagaggtgacgcaacgggatccggcgaggcccttgtaacgatttcatttcgagtcacacggaggagtctgtccccacgtgtcattctccaatccgacgcagcgatatttgtccaggatttgttgagtggaacacgtgggctgaaccatcgggatctcgcgatccaaaagggacgcgtgcctctggacgttgcattgacagctctgcttcgcggtcaagatcatgatgccttcctcgctcacaactcaattctttccgtccagcgcacatcaagaacgatgagcgccaagtctggcatctccttcctgttgaacccgcagtcctccgatgacgcggtgctgaaggtgacggcacctgcaagcccaccacctccgatgttccagtgcttgatggctatggctcaaagccccgacgcagaggccacgtcgtcgctgctgctgttggggtcatgcatcgcgccgctggagaagatgaatgctagcaagaagacggtggtgccggcattgtcgctggctgctctgtgcgaggccagcagtggtagcagttacagcagcagcagcgcttcctccggcggcagcgacgacgacgacgaagatgcagaagagctgccagcactggagacggtgactgtgaaggcaactaccccagctgccaagccaaagcccaaagcgaagccgacccggaagcgcatccggaagaactgcacgccaccctgcaaggtggaaggatgcaccaacatcattgtgtccagaggttgctgcgtgcgtcacggcggtggttcgcgctgcacgatcgaggggtgtccaaaccgagccaaactgtataagcgctgcttccagcacggtggcttcaagacgtgcgcgaccgagggctgcacgcgcaagtccaagcgctacggccactgctggtcgcacggtgggggccgcatctgtgtcatccctggttgcgacaaggtatcgacccaaggcggactctgttgggctcacggcggcggaaaccgatgcaagttggacggatgcagtcgccgatcgtaccaaaagtacggctactactgcgtcgaccacgcggccttgagcaagggcgaggaggcttaattgaaccccgccacttgcggattagttgttggtgtcgctcctgtcggtacaagtagtaggtatcttgtcatcatgccagttaatgtaataaaatgtttccaataaaaactatgagcactgcaaatatagagcttgaacctgttcggtagcaattgtacttctccacacggcaattatttttgcttgagctccgagctatctggtggcttgctcaactcgccaagatgatgatcctagatagcgtttcggagaagttgcgctcgaagcatgtgcgcacactagagctgctgcaaaagacactcgatgagaacgtcgagttacgggaacgcgtggcaaaacttcataaggtaaaacacagttggctgcgaggcctgccaacctcatcgatgtcggctaacagagttaacctgaatcgcatagggcacactccatctcggccaggggttaccacgctcgaatttgtcatccgagttggaggacgaaatcgagcgactcaaagatgagcacacgcgcaagttacaggaggtcgaggaagctgcgagtgcaaaactggccgagcaggttcaagccgcggagtcactcgtggctgccaacaacaagctgaagaatgatatgatcacgatggatgttgcgttacgcgacgcgcgtgaccgactcaaatacgagcggcaaacctggaacggagagcgagcacagctagaagcgaccataagggaggcgaccaagacccagcctcctgccagccccactcgagttaagcgaaatcaaccgcaaaccgaagctttgatcgaggaggagaaatccaaccagcgactggaagcggagcttgaattgagccgccaggcttgttctaacgcagatgctgcgcgtcgatcagccgaagcgcgccttgttgaagtgaagaatgacttcgagcgcgtatccaatgaggccacagctcaacgagagcaaatagtcgctttgcagagtcaacttgcaattgctcaagcacagcaaaagtcgacgtttgatgagctcaaagccgtacgagagcgcaatagaactctggaagccaaatcaccaaaagagcgtccatcgtcatccacggcatcagcaaagctccaactccaacaaatgacgctgctggcaaaattgcaggacacggaggaacgctatgccaagctcgaagcggagcatcgaacgcttcagtcccagactgcgaggctgcaacaacaacttgccaacgaggtcgcgcagcgcagggcagatgccgccgagtctgggatctttgcgatccacgtcgagctcaaacgcgagaatttccagctacgagcgcaggttgaagagctcaaggcactgcaaaaacgcttcttgacttctgcaaagaagaaaaccatgagcttcccctccctctgagacagcccgtacatgtagtattcgcaaaccaacacggtcagctaaacgttcacaccaattccacgattgctctattgtcttcaatcctcgtaggtatcgcttcacagcatcactcaccgttgctgtgcagcggacaatcctgctgcaatgttaagcctccagcgacccgtacgtgtgtcctgccggatcaatgcgtcgccgcgcttccgcatcggctagcggctgatactccgtcataaattcacgccgcacccggtcccggtcgttggcattcggcgtcctccgggcgatttccgcagccttcatggcgttgcgcgtgatcagcggcgaacgcgagaacgtcgacgccgtgagagcctctggagtacgaatcggtgtcaacgcctcctccaatggctccaggtacacgaagcccggcaaacgcagcgtgccattgtacaccgccgtgcccaccagcaacgtgagcatgcccgcaagctgcagccagctccaaattgtccagcgctcaccgaattctccctgcgtgaagaggtaaaacagcagcaaatccgttccccagaccgtgatcgggcggaaattgtccagaatcgcgtgccaaatcgagtttagtaggtacgtgaccgacacggcgaacacgttatagcccagaatcaccaagaggtaaatgagcacgaccacctgagccaggccgctgttcatgagcatctgatacgcgtcgtcgaagcgctcgttcgagcccaaatcgttgcccggcaccaagtaggcgatggggtacacgacgaacgtggttaacaccagtccccacactccttccatgcccaccaccacgaggggtggggcgctgtcgccttcgtccatgagtttctcctcgaaaacgtactgcaccgcctgaatggcacagctgagcaccaccataaacacgccgaagcccgggtgctgattggccgagttgttgtcttgactgtcggcgtccgcgaggctcgtggcgcccaccatgagggccgccagcatgttcaacccaatgccgatccacatgtagctgcggagacggtccttgagcacgaacaccttgagcagcgccacgaacacgatgaccgtgcacttcatgagctggaagacgctcacagtcacgtagagcagccccagattggccacaaaagttgccaacaggtcgaaggccgccggcaacgccagcaggaagtacattttgcggggaatgcggtagcggtacttcatgccgttgcggttgcggcgccactgccgctccacgtggtagtggtaggcccagtggatgggcagcgcgaacaccatggccaggaacatgagccaagtctggaagatgggcttctcgaacttcttcacctcgccgtcgaggcccaccgagtccacgccgtacaagatctgccacggataagtacttacggtcagtttatgctagtgttaaccgggtggcaggattactaaacgcaccttgccggttctgggttaagtgaaaaatgggttttcagtggcaaaagagcaaccaacatgcaacaacggttagagtagtgtttaaggcaacaaggttcttcaaagacgtacagggtggtgcccgtgcccgtgatgagccccatgccgaagaccagcgcctccctcgtgccgcacgacatggctgctgcaatggagagagtctcttaacgccactcggcttgcgtctcgcgcggtcagatcgattgtgaggttctttgcaggcaagaaaaaagaaagatgaaagataccttcagaagatcccttcgctcggccaatcagcgcgcgtttcgggtggtctccgatgtggattggtcgaaatgggaggtgtcgatccgacaaaagttggcacgaccatacaaaacgcaaatgaaagctagaatcaggtgcagcaaaaccgccaactactgtcgctgatcaaaatgtgacgtgcgtggagggatcagcaagtacgtcgccgaacggatggatgactggacagggagctggggcccgtcacgggaccccagctccctacgggactcccatgcaccggcacgagttgcaatgccactcccccaattgcagcccaaggctacggctacggacatccgtctctattggtttggttggttctgatttgcgctgcatgttgaagttgcattttccttcaaccagtctcctctgtcggttctaaaggtttggctggcctctcggtgagccctcgcagcatggtcgcgtagatttgccccgatgcatcccccgatagcgtcttccagagctcggtcacagtggtttctgacacttgctgctcgcagctttcttggctcgaagactgctctggctcggcttggacgcgagctcgggcttgggcttgaagcgtagcgacgaacttcttgcgttctgcttggtatttgaatcgagcgagcgacgcggtctctttagccacgcagcagcgctcgagcaccgcagtttccagcgctgttaaccgctgggcggtgtcttcgtcggtgaagattggggtgctggtggtattggtgtcggtattcgcttcagtgtctgcgtcattgtccgccacgagggacgagctcgacgctcgactggacgaccgcgacgttctggtggagcgagatgaaacaccggaatgactccggctgcttctacttgaggacaagttactgtcggtcttcgaggccaccccagaccagtccagtttgtggaagaccaccttgtacggcttccgcttgagaaaattcttcggaggtgacctgggtgagtctgctttcgtttcaacgatggattcctcctttggcggagaagtcgaggcgggtttacgctgcttgggcgggaaaaagcgtcgagctgttttagccagtcgagtggctttaggcaaggcaattgagcgcggactgtcgccagcttctgatgaggtcagagaggatggcgaggagggtggcgacaaagcctcagcacgggaaatccttccaatcggatcagacagtgagttcttcaacgacggcacaggaggcttcggcttctctgaatcgttcgcagcttgatatgtagattgcagcgcacgccgtcgctgggatagtttgctattggctgactttcgctgagccgctgcagtgattggagccttcttcactcgtctgctagagggctcttgcagttgttgtggtgtagcgttttcctcgtctggatcgttctgatttgttatattcacgtacggaaccatcgtgaaagcatcgttgcttgcctgcctcatcagataacatacgctaacccgaagatcaccccgaactgtatgtcccggatacgctctttccagcggaaaccatcgacgcaatgcgtattcggtcgctagtggtggctctagcaacgacagcgggattccaacgatgcccaaagtgtttgcagcccctccacttgcttttacgatcacagtcgcgctcaactcttcgataacacactgaggtgaggcaattccatacttcatcccattgtccaggtctatggggaaccgaaggaaacagtcctgcaactggatatccgcactgctatcgtggaaacttgacacgaattgctttgtcggcaaaacacgtgcgagtactttcgactgccgcttgagcagcaactccacctcaatatattttccatcgaaagctcctccagacccgaaaccaagagctagatcacgagcagaaagcaattcgaccactatttcatacggaggtagagcagcagttcgaggcgggtcgaccggagacacgtgaacatcaacgggagcaatgaaaaccgggttcgcaggaggcgccacaggcttctcgatctctaaagcaatcagtatcgatgtggagggcagctctacctcgccttcagttgctgcattctctcgcagttttgagcaccgtcgaacgaagctctggatcacgcaagctgacctgtgtcgctgagctctagttttctctctgtcgacagccaaacgcttctgctcaacagcaaaatctcgaagtgcggtattctcgtgaacgtcaagcagctcgttctcttcgtgagcttccacttgtcttcgtccagattcgatgtcagcacccactgtcaccagaaagtgtcgaagatgaactcgaagcagcttctgctgcgtggccgtggtgcgtccagcatgccgacaatcaaactcccgccgtctccgcgacttgaacgcttcgtacgcctcgctcttagccatggcctccgctcgcagcgaccatgctacgacctttcatggaacatggctacactccagccgttacgctcacttcaacttcctgtgcaagtctccatggagctcgagcaccactaagcatcatacacaagctagatctcccccagctcttcatctagcagtcctacctcctagcaactccgcctccgttagcgtatcattatcttgggcttccaaagtctcaccaccaggtgtatcgcaaagttcgcgccaaagtcgcgttctacacacaaaatctgcttgttgtaccatgcaccagccgcgccgtcatggggccgacgacgtcgccttctcggcctacagcgccgacagcgaggactactacgcgtttctaccgagcgacgagtccatgagcgacgtcgaggaagccccggtatcgcccaaacgcgattcaaattgtgacccggtggacgaattggcgtcggtcttcgcgtcctcgagctccatcggctccagctcgaaggttctgacgcccatcggtagcttaggaggcggtggctcaacgcacaaagaggccaaggccaatagaaagcagactaaagatccggctccgggggttttcgacctcggaggcggccaggagctcagggtctcacctcgagctctggagcagcacaacgcgcgcagaacgcagctgcaggcggcgctggacgctgctacgggcggtgggatgagtgacgcaaactatggggaagcgccgttccggttcgcaacgcagcacaagagagtggtcaagtttgcggacgagatggacgtggtggaagcctcgccggctccggagaccgaaagggtggaagggcatgcgccggagaagaagaactttggcaggagacaaccaagacgagaggaacaaggggaagaggatagtgatgacagtgagaacgagacggttgagccggatcctctgtatgacgagcagctggacgacgcggacgagcagtgggtgcagacacactttggtgagttttcaaggttggcaaaggatgagtttgattgtgggctcacttgttgggttttggtgaattgatgtaggtggagctcgagctgcgaagtccaagacggatgctacgttgtgctgcccgtgctgctttgtgacggtgtgcatgatttgcgagcggtaaggcttttgctgtcacgttgtttcatgctgtgcgaggatggatatgctcatggaaacgtggatgctgttgttgctctgtccgcagacatgcaacgtacaccaaccagtaccgagccacagcagcgatcaactgccgcgtcaagaaagatgagattctagcgtacacgtccagtgaaggcagtcgcgtcccagcgtcgctgccgttccacaagcgccaaaacctgacagaaggcagcaaggctactactacgactggccagcagatcgctcgactgctacaagaagatgagttttaccccgtggcgtgctcggattgtggcacgatggtgggcgtgttcgaccgggagcagcaataccacttcttcaacgccttacccagcaattgctagcaaagcttttcccggtgtcaacgatgtggtggatgtggtggatcacgctcatctagctagggctggctggctacagtgatgtgatggcctcacgataatgctatatgattacaagagttcgtttgcctctgaatactgtgttcgacctagatgttgccatgaagatggcatttggatgctcataagcacctgtgctcgcatcgctttcgacttttgcttgaccactgtacatttcacgcacgcacgatttcgtgggcgctgattgttttacttcgcacacacaaaaagccactagttagcgaggatcgctctgcctgccaggctccctcgaggtgccgtaggaatccgccagagtcgctcgcctcgcgctgcttcgctgttgttatctgcttttttcgttggttttcgggatttcccactgacgaggtgctcgcttcctctaggcaagagcaatgcctacattctggaccttgtcgttcaactcggacaccagagcttccagctggagagtggcctgggagcgatcacgcacctggcgaacagcggctgccagcttcgcctgaagctcacgcaactcctcaagagctgacgctggcgtaaccgcagtacttgacgccgccattatcttgcgtagctgctcgcagacttcttcactcgtggggcgctcgccagggtcgatcgaggtcatacgaagcaccagatccatctccatagggaagtgctcacgcgccttctggggcacgacgccgtggcgcacaccagtaagaacctgagaacgctccatcatcgtactgaacgggcagcacagctccagcaggatcacacccagcgcgaagatatccgacttgatcgagtacttggcgcttttgagacgggtagcagcgttcttcagcacgttgctgctactgaagcgatatccaagttgttcaggtgaggcgtacgtaaacgtaccgagcgcggtcgtgtggtctccgtcgcttagtccaagctcttgcaggcgttcacgcggagacacggatccatcgcacgaaccgtccgagaaaacagatttcgacaagccgaaatcgccgatcttcgctacatctccgtgaatgaagatgttgtccggcttcaggtcccggtggatcactccgtacgaatgcatgtgagctacgccctgtaccgcacccaaaaacaatctaagcccctccaggtgcttcgccgacgtattagaccaggctgatctctcctcaagtgaggatcgaagccaagctgtcaagttggagtgaacttcttcgccatactgttggcgctcctgctgcggcgtgttcaactggtccaggatgtgatggatcggctcgtggctgctagtcggggtcgaaggaacggaattcacagccgtgccacacagctccatttggatgtacaagataacctgcgacttcatgatcacaggctcaacagctacatcacgcgaggcaactttgccctcggtcttcaactcgctcggttgtccgaacgacgcctcgtcatccacacacaaaccaacagagtcctcgccctcgtcctcgaacgtgaagccaggagtggagtactgatcgtcgtagttcagcgagtccgacgaaaattccagcgaaaacgattgatcagcagcctccatgctactcattcgcagctcatcctcttcatccagcagttctagttgctggcgctgaagatcttgagggccacagtcactttccaacgaaggtacatccgagccacgcacgctttctgttgatgagctcgtgtgaggaacgcacgcatccacttctgtccatgctgtgtggtagcgcacaacgttgggatgaggggtcatggaggccataaggcgcacttcacgcaacgcctggctttctgcgcgcttggcatctagctcggtagcgcgcggcagaaccaccttcttgaccgcgtagtagcagccgtccaccttgctgcgcaccttgaacacggagccttggcctccctcaccgagagaccccaccactgcaaaatcctgctcaaagcgtgagtttgaagtcatcgaatcttgaggagtcaaggaggcggtgggtttcgtctccaccggcgtagtatcaattggagccaatcccgctgctgccgccttggtcgacatgccagcaggcatcgacactgtccgcttgaaggaagcattctgctgcacctgcccctctcgctggtgttcgtccgtcgtcacttgcgccagcgctggcgcgtccagtttcagtgactgcaagaacgcctcgcgcttcttctgctcgtcctgctgctgcttttgcagcttcgactcgttctcgtctcgctgcttgaagaatggcggcaggcggctggtctgcgagccgagccactccgtcatccgcttctgcggcgtaaagaacgccgacgggtagaacgacgacatggacgacagcgtcgcgctgctctgcgtgcggatcggcacgcggcgcacgggcactgggggcgacgacggcatcggaggagcagccgccttccctccaactccagctgctcccgacaccgccgccgccatcacatcgttctcttccgtccctgtctggaagtacccaatgaacgggttcgtcttgttcactgaggtgcctcgcttgctcgggtgcaggtcgtctgcagtctgcgccgcctcatgggtcctgatcccgctgccactgcgtgcggcggctgctttggccgccagcgccgcctggtcgctcccgaggtccgcgaacgcgatgggcgaggacgccacgcgcggcatcgcggtcatactggaggccagagacgctggagagccgaccgcgtcgtcgccgctgctccaaccagcggcgccgctttcggcgctcactgaggagccgggcgaggacagccgtccgccgacctgcgaggccgtggccgcgcgccgcacgccgggcagcccgttgaccccgttcttggcgagtccgaaggcgaaggcgctctgcatggacaggattccgggcctcttggctagtggctggaggcctctgactaattgcctgtcaacttatgatgaagacgcaatcacccgatctcggtcgcgagtaccgcgctgtcaacttttgcgagagaggggaagcgcagtgccctcgaacggcacacgtccggcaggcctgtcgtctgtctgtcgccactcactcactcacgcacgcgcgcctgctgccgcctcccgtacgctcgctctcctcgcctcgctgtgtgctatatgtgcgaagaagtcgcgcgggccccgctcctgctgcttcggggcgagcgcggacaagctaggctgggctgtctggggggtgactcacggcactcgctgctcctgccaaatagcgaagtgtcggaggatgcatgtcgacgggccgaaccctgcaaaaacgcatacataatggcttttgttcgggagggtcgacgtcatttacccatctcggtttgacgcttttctaagccgtggtggtgcaacgcctgatgcgcttcaaaaggtgatgcgatgaaccacggtctccgctggccacagcggcaatgcagctggcatgctttcgggctcgaagtgaggctatacgcgttagatacataactggaggcgtgttcatgaacatcacaggggattgcgccttgctgtgagcgtcgcaattgaactggacggcatgcgcccccaggatttaatgtcccgtactcggcgacttcaacgcgttgatttccatgtcggagcaacgtcgtcatgccataatagttcatcgtgttggacattatttgagctgatccattgccaagaaatgttcctgccgtatttggcaacagcaagcaccgagtctttccccgtacgaaagacaatcttaccccacgcagacggagttcaacgcctgcaacttgcagcttttcgggcgcaacgccttcaacttgcagatcaagctcggggttggccaattcactaacagagacggctatccagcgtttctttgctggcgcaggaaaggccccacacaggccatgcctggacgacacgtgggctgcgctggccgggccaaaacgcccagctggagcttcaagccgcggtgcatgcccgagtgttcaaccaggtgcggcaaagcctgccaggcgcctctcgaaaaattgctgcgcatccgcccccaagcagcacagccagctttaccatcgtcctggcgcgtgctgggcacgcgactggtatcaacacagcaacgagcctcgccacggcaccgccgtggtctctgcaagcacttagcgtagcgtttcgtgaaacccttgcaggtagcttgctcaagtatcgacggcacggacccgccatacagcgccaccacagccgtgaacttagccgagttgtccttcgttgaagttggcgcatgcgacatgtcgggagattgcactttgtaatcagactggtgtgtgggacataagtctggtgtgcctcacaccaaaacgatctaagtcagcaatagccagcaacagccatggcgggacgacacctccgcctcgaggagtacgcgtcgtcggggctggcggtcgagtctgaggacgtgggcgatgccctctcgcgcgtgaaggtccgccccatgcacggcggcaggggcggcgcgggtcgcggcgccagcgagacgcaggaggccagcggcggcgctcaccgagccgccgcctcccaccgcgagaacgaccgctacatggaggccttcgacgccgcattcgaggaactttcagcggcagaggcggcgcgctcggggataacgagacatgagctcggcgaggcgtcgctcaagccggcggccggttcgtctgctgccaagacgacgctgaagcaggcgtcacccgcgactgattcaacgcaggagctcggaggcgcgtggctgcagggtccgagcgcgcccgagggcgagctgcacgccgtatcagcgcagccgctcatgtgcatgaccatgagcgcggacgagagcgaggtggtcgtgggcagcagtgaccacgcactgtatgtggttccgctgggcagctcttcctcgtctagagcttcccgcggagctagcagcagcagcagtcgacccagaacattgtacactaagaagtacggccatactgagtgggtcacgtgcgttgcccacttaccggatcgacgggtcgtcagcggcggcatggacagcaagctctgtctgtgggatgccaccggcgtcaagtgcgaggacttgctcggacacagcgggtcggtctcgtgtgtgctggctgtgagcgacgaggtggctctgagtgcagggtatgacaagatgctgcggctgtggaacgtcagtcaaagggcatcgagccgccagcgcgagatcagcgtcatcaaggcgggtacagcaccgatcctggacgtgtcgctgcttcctggtggtcagcagcaggcagcagtgtgcggggatcgcgatgggggcgtgcagttgatcgacctgcaggcgaacaaggtgctccgcaagcacgcgaacgcacatcgaggacacaccaccagcgtgttgggcagtagaggtgacggcacggatgagggctcggtattcttctccggaggccaggacggcgctataaaggtgtgggatacgaggcagaagtctgcagcattctcgcttgagcttcacgtggacccacgcagcggcaagtctggtgcagtgggctttcttcgtgagccggtggaggatgccaacatactgatatcaggcggtgctgatggagttatcaatgtcctagacaagaggcaatcctacagcgtcgtgcacagcttcacggagcacttggacttcatttattcgctccacgttcgtagtcagctgtgcttcagcggcgctggaaatggaatgctgcatgtgcacgactggaagcaaggcaagctgttgtatggccttggcgcgaatcaggcggcggtcagagcggtggcagcatcggcaaaccatctgattgcggctggagatgatggcggagttgttgtttatgacatgaactagaagatcgttaaaggagaatatgcggagcgtgttgccgcccggacccagcctccctggcacatggatgtcagatccccagaccttcagaagtaagtaagtcacttctactcccgtagctcgagtaactgacccacctccatcacgtgcatttgttgcttgtatacaaatgtttgggaaatggaacggtgtcgcttgcatcgttacgaagtgactttaagttctggaattttgaaagtcttcagtgatagtccaagacactatcgaagcacaagccattatgaagctggacatttctccaaactgcttaaattactatcccaacaattactgtggcatctcttcgagtcgcgcagtctgctgtactattttcctgcgaatacaacatcggcattggcaagagcgatcactggccccactgccgtcgtagtcatgatggggttcgcggacaacggagagcgctgctgggattttgagttgcctgtacgttcctgatcgaaaatcctgacaccaagcgcatcatgttcgtccactgcgacttgatatcggtcatgccactcgtacaccaggaagtcctcgcgtagctccgaccaagtaccatggcgtctacactgaacaaaacgtcgtgcttcacgcatctcacacgcgcgctagtcccggaggcactgccggatatttcctctacgacgcctccatcctcgggttcgtcagcgaaaacttcgacaagatcgtggaaggagtcatggacgctatcaacgcagcgcagagcggaacaaatccgctggagcaagtgtaaggtccccaaaggaggcagcaaccgctcaccaagtgcgtatctggccaacccggcatccgagcgagccaagtacaccagcaacgtcgacacaacgatgcgcgcgcgctgcttcctcaacacgtcggataaacttcgaggggtgttggcattctacccggtgcaccccaccaacctcactgcgaagagtcggttggtgagtggggacaacaacgggtacttaagcacgccgagctcctgtttgaggacgagctcgacgatgcgattgtcgccactggaatcgctaacgccggtgacatgagcccgaaccgaatcgacaacggacactgggacttgcgtaccgttggaagcgcacctcattgctgagagcaagaacacgtgcgagtggaacatccggaaaggcgtccgcacgagcgtcgccggcacctaccgcttcgtgcaccgcgggtactcgaagagcttgttgggcgcgctcacggcgtatacaaccacccccaacgcgttcacggtgacggcgtaaaaccgataacccctacgccaatttcctacatgaatcctgtctgttgaattaaaaacttggatggtttagtttgttgagctgtctttttcttaagtaccgtggtgaaaagcacccgccaacttagttcttccgcgacaacttttacgttcacctcaggcacaagaccgtttgagtttgatcatgcagactggaatagtattcgctccgcccagtgatggtagttcgatctccagggtatggcacacacttctggcgtgaggatttttcgcagttcatatcaaggctcatctgtactccaaaattatcggtatactttactccgaagatcttcaaatatcttgcgtagacaaatcttgctttttcattgatatcttcatcgacgtatcgtagactgtagcctacagtaatcccctaggatttggttctcgatgcacatctaagcaccctagctgatgaccacctccattaacgtttcaaggatgacattgccacaatatggttcttctcccacgtactatcctaagtttccactgatcttcaagaaaatatgctaggcgaatccacacgcacgtgcgggtggctcattgctatctggcatcatcatgcgctccgtccaggtgttcgattgaaggaagtcctgcgaagctctgaaggaagcggaaatatccgagcgcaagtcgctgtctcagtcatctctcgctgggggacatcctttcctccttgccgcttcagtcccgaactcctcacaactgaatttgccagtgcccccacagcccggaactactccagatctctcgtcttcactccatcatgatcaagatcgtcaagctctttgctgttgtcgccgtcgccgcgttggccctggccgcgctgcccctgacagaggctgctgcgcacgtgcccgctccgaccccggcagacaccaagtggtacactccgggcaattaattggtgttatcggaggctattggtcgacgtcaacatactaccgcttgacggcataagcaagagagccataatataacttgattctcatgaatttgcttctccctttgaaaagttgagtcgaactcgcaagactattgcctcttttccgtcccgtaataattctgttgaagtcaacctgaaattctagggtcatctaaaaaacccagaatatcgacagtgaaacggggttacatggaatagtgaccctgtcactattccgggatagctacatcggtcactcccctgggtggcctcagagacaacagatacattttgtatgacacaaactataggaaacttaggatttgtatgcaggccaaatctgtaccaacctataaatacattcagtcttagatctaccgcttttcaagtcaagtcgtccccttcagaccagggacacgtgaacggctgttcacttggagtttgtatactcctgcttcctctgttaagaagtgctgtgtgccccgtcacacttggtagcacttgtagtcaatcctacgcctacgcgggtagattggactacctgaatcctctgtggtctcatcgagtgagccaagatggatcgtacggagtttccccatctgaacgactcgcagtacgagtccgttcgtaagatggcaggcatctttgggacagatgccctgcgtagcttagcggcggcgacgccggctgagcaggttgagcgtatcaacgcgttcgacacctacgagcgagggctcatcgcccacgttcaagggttgcaggccactgcggccgcgccgaagccggtgcaaccgaagcccctgcggctgaaggttcaccccttcgaagggaaggaaggagaaaaccttcacttctgggttcgagaggttgagctcgcgatggacgcggctctcgtctcggacgagcgactccgtgtcgcctttgcgctctccaaccttagtggtcgcactaagagttgggcatatacgcgcgaagtgacgacgcctggatgcttcgcatcatggtcccagctgtgcaagcagctgcgggccgcgtttcttccggcgaactacgagtaccgccagcgttcgcgcttcctcgcctgcaaacaaggaaggcgcgagctgcatgagtacatccaggagatgcgagtgctcactgcctctttggtggggaaccccctgcctgagcacatcaaggtgaccgtgttcatggacggtctgcgtgtcggtcctgcccgcacgcaaccgttccgtgtgcaagcaaacactatggaggaggcgattcagatcgccctccaggaggagtacagccacaagcaggctcgtacccccgccacggtatggcagagcaaccctgcctctggcggtgcgcctaatggtaactccggcaatggagcgatcaacgggccggttcccatggatctgggcatggccgagcagagcgacattcgctgctacggctgtggcaagcttgggcacatgaaacgtgcctgtcccgcgggaggactgaagaagaagttctcttcgaagccctttggctctaggggtcgctggcagaagccgcgccccaggaaccaggggaacgccggacaccagtaggggcggggcgccctactggggaaacactaggtcttcatgaggggcgtgcgggtggcgcacgccatggggacttagcccctgagagtctctgtactctcgaagcggagaagggcagcggtgggctgcttgtggtacacgcgagtgtaccgggatacgatcagcccttgagaatcttgatcgactctagggcgtccaagaactttgcgcgccgccagactgtcgcacgcaatcgcgaaagtacgccgatgcgctacgaggcagcaaaggcaacgggctggtctcggtaagactggccggcggtacggtggtagaagtacctcgggtccacatggacctcactttcaagttcgaggacttcgacagcacggagccgttcttggtcctagacatggacaagtacgacttgatccttggcatgccgtggctggagaagcacgagccttggatggactggcgcggcaaggccatcggggccagccgtcccccacgctctgacagagctttggtgagtcatgttcccacctctggcagtagctggggtgcccgcgagggccaccagggcgcagcagcgtctaatgagttcttggggtccgtcgagactgacgacgactccgaccgggccggacaaggcttgagagtggaggtgccggacagcacctaccaggtgggtaacgtaggtccacacgcgggtaacgaagtaccgcaggcagcaaggactgctggagaaggcgccgctggcgttggcgtgggtaaccaagttccacgcgaggtcactcagaccgtaactgatgaggaaggcattgcaggcgcttccgatgtgggtaacatagttccacaggaggtcactcagaccataactgatgctggagtcgctggaagcgctcctggtgtgggtaacatagttccacccagcaaggcgggtaaccaagctccgctcaagaacaaggcgggtaaccaagttccgctcaaggacaaggcgggtaacgtagttccgcacgagatcgagaagatcggtggtgccgtccaggcggcgccacgagacgaagacacccgagggtcacgtcgtaagccgggcctagtcgtgtggccgacgacgccagtcgccagcgactccgagcctccagccaaggctccagccgccgaagagtgttatcacatcttcgacggcgtgaccggtcgtctggtcaagacaggagctgtcgagcttacagctctacccgaggtttcagagttgctgaaccttgaggagctcgccatggaggacttcttggccgagctaaaggccggggagatcgcagagttggttctcctccgaccggagtccacgtcggccgagttgaactcgtcctcggtcatggaccaggcagtcctggaggagttccagagacagcgcgcgtcgcgcatgggctctgagattcttaagaacccccgggacccggtgtaccccttggtgacggagtttgaggacgtggtgtccaaggatccaccgtccaatctccctccggacaggggaatcaggcacgagatcgatctcgtgccgggcacgaagtactgtgtcacgagacaatggcctcttccccgggagcagtgtgaagtcattgatgccttctttgccgccaaggcaaaggcaggcatggtgcgggagtcgaagtccccgcaccttctgtgttcgcaaaccgaacggaaagtggcgtctggttcatgcttataacaagaacagcgcgacagtgcctgcgcagacaccgatcccgcgcaaggacgtgttgctcaacaacatggccggctgcacgctgtatagcgcgctggacctggtggacggatactaccagatcctgatgcgcgagagcgacatcccactcacggctgtgagcacgccgagcggtatgctctgggagtggctggtcatgcctcaggggctttctaacgccccggcaacgttcaatcgcttggtcacacaactgttccgacctttgcgtgcgttcacacagacgtactttgacgacatcttcgtccacagccgtgccgaggcaggccagacggccatggagatgcatctccagcaccttcgacgtgtgttcgaagtcatgcgggcgaacaagctgtacgccaacatcgacaagtgtgtgttcgcagctgaggagatcaaggtcctgggctgcttcgtcagcagcgccggggtccgggcggacccggagaaggtgaaaaccatcgcggcttggccgccacctcggtcgcagaaggacctacgacagtggttggtcctcgccaactacctgcacaagtatagtgcaggctacgccgagctggcacggcccttgtcggatctcctgaagaaggatgtcgactggcgctgggagcgtcgccatcaagatgcttttaacgacatcaaagcgagcttacagcgcgcgccagtcctggcattgccggacgagacgaagcctttcagcgtagtctgtgatgcatctgactacgcaattggctgtgcgcttttgcaggacgacgatgaaggccgcgaacgggtcatctcgttccagtccaggcagctcaaggcagccgaacggaactatccagtccacgacaaggagctacttacgctcttgtcaagttccgagtgcacctcctgggctcgacgccctttgtcgtttatacagaccacgcgtccttgcggactgccgtcaacacgccgcatctctcacagcggatggcgcgctggctgtcattcttcgcggaatacaacttccgtgtcgagtacaagccgggcaagttgaacgtgcttgccgacgcgctgtcgcgccgacccgactacgagcttgctcatattagtcgggtcacgacggatctgtatgatcgcatcaggctggggtaccgagacgatgccagtctcggacctcttgtgcggttcttggccgctggctcggaagccaaggccgagtggctcacgccccgacaacgtgcaaggctgcaacgctatgagtgggctgacggtttgctccactgtagggtcgagcccgaggatcctccccgtattgtcgtgcccaacgacgaggatctcaagtaggacatcctgatggaggtgcacgacgctccatccagtggccatctcggccgtgagaagacgtacgcgtctgtctcgcagatgttttggtggcgtcacatgtacaagtgggtcgccacctacgtccgtacgtgcgagacgtgccagcgcgtgaagcctgccggtcacgcctcggcaccattgcagagcctgccggtcccagcggactgctggaagtcgatgagtctcgactttgtcttcggacttccggccgatgaccgtggcaacactggtgttgttgccttcgtgtgccgtctgagcaagatggtccactttgctccagttcgtgacaccggcactggcgacgaggtcgctcgcctgttcatggactgtgtcttccgacaccacggtctgcccgagaccattgtctctgatcgagacccgcggttcaccgctacgttctggcagacgctgtttcgccttcccggcacacgactgtcgaagtcgacggcggaccacccgcagacggatggccagacggagcgcgtcaatcgcgtgctcgaggacacgctccgcagtatctgcgcggagatgccccgctcttgggctgatcgcttgcccatggttgagttcgcactcaacaatgcggtacatgcatcgacgggctttacgccctcttacctgaacgggttgtgccatcctcaggtgccgctcacattacgaggcagtgccggggcttcggtcctatgtgggggagaggctcggaaaaccttttcctcccaagtctcggacgtgagtccagccgccttgcggaagcaactgtcctcgtttgccgaagacaggctgaacataatcagcagggtgcgagacaccatggcgcaagcccaagataaccagaaggagtactctgaccgaaatggaagaggaaacatgaacgtgtttaaggttggggatttagttctcctagatactagaaacctaccgctaaacactgttagctcggtcgagagcaacaagctgaagcaccgcttcattggacccttcacggtcctcagctggcatggcgtggcgtacaccatagacttgcccaagtcgatgacgactcacccgacgttttacgtgggtcgtcttaagaggtaccatgaccctctggctctggctgccccgcaggaaacggtgggtggcccggtggagaagagcgcagctcctcgaagcgcggcgtcgggtcgtaagacggcgcggcgtacatcggagcagcatacacaggggtcccgtacgagccctggccaaactgggcctgatacgagtggggctgccgctgctccggatacggcgcgtggccatgaagctcggcccgaaggccagcgagctggtttcgcagcgagtcgtaagacgacaggtcggctcgacgatccacatggccatggagactgcgagtttcttgatagagcgaggcaacatcctcacggagccgctccacggcaccaggctgaccagcacgagcggcagcctcgccaccaaggccgacgccaagcgcgatctcgaggacgtacacacggtcccggagaagacgaatctcctcttgctgcagggccaccacctgactcggggccccagcatacggctgcgtcgcctcaggctcgtagccatggacgcgcgaggccaccgccggccctccttgatcgtaatgggcagatccactaccacgtggaacgagtcgtccgggagcggcggctccatggcaagcgccagctactcgtgaagtggaggggttaccctgagcaggataactcgtgggagcccgttgagcagctccaggcagactgcccgaaggctgttgcgatatgggacgagaagcagcggcagcttcgtaagtagtccttggcttcttggccggtacccggggcacggtagcagacgtagtcgcaccacgcccacgctcttcacgagctttggctctcgcctcttgcttcagctcgtccattttcgagtggagcttgcgcttgctcacgagttgagtgaactcgaagcggagctcgcgcacgtccaggattgcggacagagtgtgatcctcacggagttctttgaactcttggtcggaataccctttgcgctggacgtagcgccagaagaggtcttccacctcgctccaggtcatgttgtcattcggcttgacccagtggaaaccccagacaggatggagtccacccttgtcctccggcttcttgcgaagcgtggtgaactccttcagtgtgagcttgtgtggtgctagtagcacacaccgggtgacttcaacgtcgccaagaaagagtggctctttctcaacaagagcacgctcataggaacccctcgaggtgtacccgccgataaggccacgaggagccgagagcttctccaacagcgctggcgcaccagtgccagggtcgggcgggaagtagccctgcgggtacgtggcatccccgcctgaagaagactcgatggcagtcgtggcagtcggctgcctggcatacgcacccgagctagcagcgtggtattgctgctgctgctcgtcgaggttgttggagagctccttgggctcgtggacggcaccctcctcgtcctcagactccgagtcgatgaacagcttggagctggagccgcgaggcgacctggaagctgaacgcttcttcgccttggcctcggcggccttcgcagcggcagccgctttcgacgcttgggcacgctcacgaccttgtggcagcgtcagatgcttggatgccagcacctccttgggcttggagcccgcgtcgctcggcgacttctcggccacaaccccagcgtcggccatggcgacttcgtcgtgcgactgcttgctgtcgtctgagccggactcggcgtcctccgcctccttccctgacgaggcgtttgcgttggccgaggcgtcggtcatgtcgcctgccgccagctccgtgcctttggcagcgtgcgtgctgccctccgagacgttctcgtcgtcgggtgaactctcacccgagtactggaccatcgtgcagtcaaagacggcggcttcccagtcgcgagcctggcttttatggccccgagggctctcctccttgccttgcgcggcgtcaggagacttgctccgagccccggcctgacggccactctccggcgtgctactacgagagcgcaccacctcctcggccgccttcgtggcctcgatcagcgcggacgactcgtccttggccttggccgccctggtcttcggccctacggcgcgcggtttcggaggtgctttcgcactgcgcgcactgcgctttggaggcatgcttccggtcgacgtggagaccctgcggcttgctcggcgatacgccagttgctctgtgaggcccgggagccgaggcgccagagctcgcgccgttgtcgatggatttcgactttgcgagtgaaatgtgagtcgccggcgtaacctcgctctgattggtcgataagatcgaatctaagtggggaaggatgtaacgggattacatggaatagtgaccctgtcactattccgggatagctacatcggtcactcccctgggtggcctcagagacaacagatacattttgtatgacacaaactataggaaacttaggatttgtatgcaggccaaatctgtaccaacctataaatacattcagtcttagatctaccgcttttcaagtcaagtcgtccccttcagaccagggacacgtgaacggctgttcacttggagtttgtatactcctgcttcctctgttaagaagtgctgtgtgccccgtcacagacagtgtgtattccacacacagtagtgggcaattcttgattctattttaagtagttgacttagaaaaatctgacttaagctcagctatatttccgtcccagcatttccatcgccaagcagccgccgcgcgccgcacgacacgctgcaggcgtttaaactgtgcgggcaatatttaaccaagtccagtggttgcggtcactggggagtcgacgacgtgcaacgcctttcgcccgcctctaaattgacaaaatcacgtaatttttcttgggaaatgactgaatctgtttgaaatccattttaataccaaatcggtatattttgtaactgaattggtatgcgttatttttaattattaaggtgcgaactactacagccacggacgtcctagcttcctgtaggctcccccaaacaagtgccaaaacattccctgacgaggttactgtacccgtggtatgagcgcgaactatttctcgtgcttatctagtgcaatacaaccatcaatacaacgtggcatgctgccaccaaattgcagcactgtcgggcggaggaaggctggacacagatataagaagtttgctcgggttctcaacgatctaggtgcttaaggatgtagtggcgtcgctgtcattttatcgatcttaaggggttgacaggctggatgaccatatactaagcaaaacaagcatcggagaagatgcacttgctctcagacaaggatatgatggaagccagcaagtagttcacaatggacaaactcacaactaggtgtttagttcgggagtcgacccccgagtgactcgaccggtatgcgtgattggagggtcattcagcattttaaaaatgcgatttcataccggttttctaagtgtttctgaggtcatcaatagtaaatatatatttttgtgtatcgtatgcttcatgccctggaattcattacccacgacgctgggcagggggcctcgccccctgcggagcccacctttggagttccatatttttgcacaacttcgcatatttattgaaagagctacaccaggggttgaaaggttgaaaaccggccaattgtcatgttatattattttcggctggccacacttctatatttgagacgacggcaaacaaaacaaatacttacgaacctaagtacgaatcgcgatttaaacgcataaatcgaaacaaccgtggtttgtggttcttttaagctattgggcacttgaaaatgttgagaacccgaggaggggcaccggtctgaaaaaatatcttttttttcggacccccgaaatccaggattttaaatggggcgtgtgacctcaattttctccaattttttgtgctgtacattatcagaaagctcgtgctaaaagccagtgaattagagtgctttccgctttctatgattgtttttcacctttaaattttgatgttccgttaggtacgaaatctggttggtcaacttcaaacacgattattttgaaaactccaaatggttcgtaagcatcattttgtttgacgcggtctcgataaattttatcaaaagccgcacaatttaaatctacactgtcctcacagaccaaaacatagcctctataatagtttgcaccttgtttgggttggcgcagataagttaacccacataaacgaatatcaatagagtattttgttcacttggactatgaatttgaacttgtatttatgcaattgagatgatttgcttttgctctggaaaaggtgtaagttggttggcagcgtgtgcacggcgccgtaagcccaagttgctcaaagtgcattcatcgccatacgtacggtattgttcggatggtgatgcggaagcttttcaaacaaattattttatcacttggctatgcgctgtgcgcacgaccccgacatgtaatgctcctgctccgtgctgctcgcgcgcgcatcgtgtcatcaagtattgcatggtagatcgcggccaatcaagagaatcaaccatgtgctagctgtttgtcgcgttgactcgaaaatgaactcaagaaactgtaaaaaaaatgtgaatcaacttggcagttatcgttgacaacaaggatttattaatacgtacaacaaacaaagttgcgcgttgcacgaaaaaactttgtacagatcaagtcaccttgagctttccgactcagtcggaaagcccggttgagccggtatgtgtcggggaaagacgtcgcgtcgcatgccttcaataacacgtttggcgttcgtgtgaacatgcaagaccaaaagttggtgtcagaattgcacattgctactttaaattgctcaggaaataacatgcgattttggtgagcaacgacgttttacatcctgtgcaaatgacaatacttcgtctatttatcaaggttgtcagggtaaaaagagaattctccatgctttcttcacagctacagagcatacatcctggctattgtctccactatatggataaatatcgtgacggtgccgacacatatgattttatacttagccactgtatggtgaccatggtccaatcaaatggcgatgaccgattattatcgaatgagaagggcgatagatggtattttatccaatcatcaacgttaggggtaggtgtatgagccgccgacactcctgccgacgtataatgtatgcagggctatcgagatatgttatccacctatagtgaagttaagtaattaggtgatcatacacatattttgcacggtgccgacactttactttgactttgtattgcttctgtttgcctgttcgaagcgttttgtgtggcgctttcttgctctacgaagtcaaccgagtttctcggcaacgctattcccgaagcagcattgtgtcatgttgaaagctgctttgggtgaggcattgttggtgacactatggccactgccgctaaggtaccgccgtcaatacatgtaagtgactccgcagcagttgagagtttaaagtggtacaagaattagaaatattcactgttatatacatactattcgtgcaatatactacagcactaagcaacgccgcgcctgtagaaagcgccatcccaccatgcagcggcggcggcaccaatcgcgccaccagtagcagcagtaccccctccgggaggagtcccccccaagctcgacatcagcgagcgtgccctccgccgcacccggcgatcgacaactcgcagccgccgcgctgctgctgcgggtgctgctggttgtaatggcggtactgggacgagggcggctactgctgcgggggcgtggttctgggttggctctgcagctccgcgtgctgctgctgctgcctgcagcgtgacgagtgggtggccgccaggcgcaggcttcttatcgggcgtcctctctcctcgtcttccttcgcctcctcctcccactcctcgctgttgccctccgctgacctccacgcacttggcgcctttatcttccgccgtgcccttggtggtcgcaggcttcggggccttcggcttggaggcaagcgccatgacgcgcgccatccgcgcgggtgcgatcactggcccgacgcgtccgtggccgggtacgagcaccgcgcgtccgtgtgtgagatggcggtgcacgtgccagcgggggaggactgttgtccttcgtgcccttggtcatctcgccgtccttcgtgcgaactcgatcaggggcgccgccaccatgccagagaaatgaaaatgcgagaagtgctaagatggccatttagaccaatcgtagaaattcagtattttaaccaatgctcgataatgccggcaggtgtcggccgctgtcggcaccgtcatggtatggcacgtctggcctagtcaccgctttctgtatcatgccaatcttcgtactcggttgcctccgctgctgcagaactgtgtgtagcaagcgatttatagaattcttcagtcaacgattgcagcaactaatatgccaactaattttagtgctgccttcttgcttccgcatgagtggttcgtaatagttagccgtagctatagcctttggatttagacttcactgctccatgccagttttgccaaggatctatcagtgtactgaccgataccttgaattaggttatctaaaaataacttaatccaaactactcttcagtacattgtttcgtacgttagcggagactttttacggagctgcctgacctctcatatgtttttttacggcgggctccactgtcagttgcctccgttaccacatttaaccggagttcagccaccccttgaaaagggttccacggtccatgtgcataaatcgtcggtcgtcaactctttccctgaacttcaacgattaacgcaatcgtttgtttgctgatacaaacggggcgatctccggctcgataaaaagttgacctcagtttaataacttgttacaccttcgaacaaggtaacatttgaagggtcgcgtttgggcgccgttcaacatgagttcgtgtgttcttaaaaagacgtaaaattcgatcgaaatcgccctcggacaggctatgatagttcatttgccctaccccattctcaattgtaatacaggggttcataaattggagtaaaaagtacctgtaaaaagggtaaaaagtctttatgcacatttcattatacggggggctatgccccaaacagtatgatgtgccaatcagagtccgaagttcggacggctgcttggcttcgtctgaatacatgtattgtgctttgcaatgattttggcaacacgaggcgagatttgctgtatttatagcgaccacctgctagatttacgataaatcgaggtgcataaacgggtggaggcctagaattacgctaaaagcgccacaattgcactttcaaaagtgcaattgtggctgtgcagctgcaattctgtcggtttttatccacaagcacctacacacacggcaattatgcataagagggtggatgtgctggggatcatggacggtggtgtactgggccaatgcatggctgctgaccggccctcccaagccgatatatatatgaggaggtggatttatgcataattttagcaggtcgtgtatcttttttcacacatatttaggagcaggctttgccatatttagcgtctaaaatggttggcaaaatcattgcaaagaacaacacatgtacgctaaattccagcgcttgaagacgcgcaatggaacgacgaggaagctgcttgggggcggggtgggcagcggccgaacgaatttccccaacggttaaacatatttgtttactatgcgttgttttgtctgcaaatctggtcccgctctttgagcaaaagctggtttacatgtgaacctattccgatgaatcatcgccgatgatgctatctctttggagagcgactaatattcaccaagtattggcacatcattaagagccggaagttctctgcgtgatcggctttgccatcactgatgacaacgctcagttccatctcgacaccgttacatcgatagtggcggcactgcaacagggtagattctgcccaaatgagacggtttcaaacgaaatgatgcttaggcgccatttggagttatcgagataatcgtgattgaagttgaccaatccattttcggaaataaccggggatcaaaatctcgaaagtgaaaacacacataaaaagcgtaaaaacactctgattcgcttgcttttagcgcgagctttccgataatatacaatacgttaaaattgaaaaaatattgaggtcacacgccccaaataaaatcgtgaatttagggggtccgaaaatggagataattgttctagaccgatgtcactccgggagttcttaacatttcaaagcattcgatagcttaaacgaagcacaagacacgcctctttcgattgatgcggttaaatcgcgattcgtacttaggttcgtaagcatcttttcgttttaaaccgtctcaaatgtccttgcccacacagctcggcgctcttctaaagagctgacaagtttcccatttctcctttccaagtagactagacaccaagcggcttggagttctcgtgaagatgcactggttcaactcgctagtcgtgttgcccatgctcgcctgggtgactctgctctctatgggagctcgagctgaatccaacattggcatcggcaagagcgacatcaccgggcctgctgcggaggtcctcatgatggggttctcggatctcaaggaaagcactgcaggaattcttaaccggctgtacgccagagcctacttcatcgaagaccccgtcaccagcagccgcgtcatgttcgttcactgcgacctgcactctgtcatgcagctggtgcaccaagaacttctcgctcaactcgccaccaagtatagcggcgtctacaccgagcagaacgtcgttctacacgccacgcacacgcacgctggaccgggaggcactgccggctacttcctctacgacgtgtccatcctcgggtacatcagcgagaacttcgacaagatcgtgggcggcatcttggacgccatcgaccaggcgcacaactcggtggcgagcggcacgatccgctggaacaagggcgaggtgacgaaaggcggcaagaaccgctctcctgatgcatacatggccaatccggagtcggaacgagccaagtactcgagcgacatcgacacgaccatgcgtgcactgcacttttccagcagcgagggtaaacgtcgaggtgtcttggccttctaccccgtccacccaaccagcctcactgcatctaacctattgatcagtggagataacaagggatacgctgagttcctgctcgaggacgaactggacaacgtcgtcgtgggtatcggcatcgccaacgccggagacgtgagtccgaaccggatcgacaacggagacggcaccttcaagggcgagggcaattccgcaatcgtgtctgcggagatcatggttcagcggcagtatgacacgctgtctatgctcattaagaacgagtcagagctcatcaatggctccgtcgccgccagactctcctacatcgacttctccaacgtcactttcgacggcgtgaaagcaccccagacaacccctacgccgacaaaacttgccccgccgtcttgggacaaattttcgccgctggtaccgaagatgaacgcgcacacaacatgttcacggagggcagccagaagaccaacgagctgttcaagaccatcggcagcatcatcaagaagacaccgaaatggatagaggactgccaaaacgctatcaaggtgccgctgttggctgtcggcctcatggagcccgtgccttgggtgcccaacattctgccggtgcaggtcgtcaagatcgaccagttcgctatcgccatgaccaacttcgaggtcacgaccatggcaggcagatgcatccgagacaccgtcaagacggcgctggagggggttggagtgaccgaggtcgagctcgcttcagtcagcaacgcctacgcgctgtacttgtcccccaaggaggagtatcacaagcagcactacgagggcgcgtcgacgctcttcgggcccaaccagttggctgcggtgcaacaggaattgactcgcgtggcgaagtcggtggccgacccgtccgtgccgttggacgtggggccagcgccgcggcagatcaagtgtgacgcggtgtcgatccctaaattcgggtgaatgcacctgaccctgggaagtcccaatgatatggagcttggtgatactggatgatttggagtctcctataaaaacaagggtaatgtctgcgaatggacgctgaatcccggaagatagatcaatgtgggcgagttgatcccgttccatgaagtgcaacggaatgcgagcgatcctccccagtatatctaagtacggcggaactcgactctggcttacaacctgggagctgaggcacttctcagattctacgttgttttcccggaataacgattcccagacttcgcgttcccagacttacctcccacaaaattccaagaacgacctcggcttgaggcgttccgaggctccaaacccaagaacacttggtttcactatggcatcttccaagatcctaggtgtacccaacaacccgagaaggtatccagtttggcgacccttcaaggtcagaccaacactccgcagaaagatcgcagtctccgaagggtcgcttaggaaagatttcgtctgcatgtgacctttaaccaaacagaattcgttttgcttcgaagggcacaagtgcttctttcacagcctggaaggccgttctccacgacaaaattcaaagcactttaggtaagtgatccactgcttcggcctggacgtgatcatatctattacatatctgtatatttggcggattgcagaccgtctttgttgtatatttgcggtctattgggcctgtgtcgaactgaagaagttggcgacagggtagatcgtttcctctctccgagaggtggtgcgtgttcccaagattgatcaagtgtcttggatttggaccagttgacttgtattttggccttagccttgggcctagagaaagaagagagggcaaagaagtatttgtgtgattgtataacgtgtacaactctattcgggctggattgttccagcgttagcccggcgtagctgtctgattcacggggtcgatactaacctcctggtgaaaagaatcgctacccaagggatacacatcgtgcgcctgaccaacagcgtgtactggacaacacacaccctgtgccagccgagacggatccaaagctctagaagcctgaggtctgtcaaggagggcctataactgttttctgggagaaaacaccgcatcgcctcgtcacagctggtgcgcgtgcccggatcaggggttggaagttgaatgtgcattgtgagagttatgcctactaacgctaacgcgattgtgcctgcttcgagtcctggaggacgcggacgaggtcgtggacgcggtcaaggtgctcaacgagtgtcaagaccgctgcaactccctgtcccgccgccggggcccggacaagatcctgcgatatcgacggagaccgaacaacaactggcgctggccgaaccagcgcgcccgacatcgacccattcgacgccaagacgaacttctcaagtgatggttccccgttctgtgcagtccagccctggacggcccctagaccgtggttccgacgatcaagcagcccgtctgccgacggagttggcgctgagccctgcggctgcaagcgctcttggaaaagtgatcatgtggcgctgcgagagtggtgcgagacgagggtcccggattccggtgcaccacttcgtcttgggcctgctcctggcactcgtgtcttcggacctgaactgccaaccacgctgcactcgacgttccaagatccgcttccgctgattccacggggtacgagtgaaatcccaggatccgacgtaaactgtcttgctgacgacgaagcccgagcgtatggagccgaacaacagagccgctggagctctcttccaggagaagtcatctctccagtcgacgtggtctacgacgagggagatgaagagtacgacatggaagcttgggtcttcgccgcattcgagactgggaaatacttgggtcttgtgaacgctggtcggacttccgagtcttggatcaaggcgttgtctgccaaacgcagacggcaaccgctggtctcggacatgaaggccgtcaccgtatcgcccaagttgcttccggctgctgcatacgtcgctgtgctccagaccatgttaatggatgccggcttcgagtttcgcaatgtgattcctacgtggagtgaagtccgtgcggtgtccgaggtgtctgagaatctgatccgccgaggtgttgaagaagttcaactcagactcgcagttgcgagtcttgagtggaacaagctgatggatggcgtagggtttcacatccgacagccgctggagcctctcccagctgtgcgactctccgagcgaagtacaagttccccgactgatggcgatggagacgtcctaatgacggacgacgccgtggaactgcttggcgaagaattgtttcgccgcttgaggatcacgcggaccagaagaagaagtcctgcttcaagcgtgtccggacaaccagcgcccaagcgtgcggtctttgaagctgagcgatctccgcccagttccctgatgcctccgacatcgtcgtcccagagtctggtgccccaaccatcggtatcccagaacgtcgtgcctcggactcagagcctagtccctagagctccaagtcttgagctgatggcgagtgtggactcagttcctagtctggtgggaccaagtggttcttccgacgagtcgatgaacgcggccgctgaaggaacagacctgtcggggcacagctcctcaggatcgtggttcttgtccgccgcggactacatggttggcagtgccttgagtcatatgcctggaccaagcccgatggcgatggtaatgattgcgcaggagagcgcggctgcggcagctgccgacccgggtttcnnnnnnnnnnnnnnnnnnnnnnnnnnnnnnnnnnnnnnnnnnnnnnnnnnnnnnnnnnnnnnnnnnnnnnnnnnnnnnnnnnnnnnnnnnnnnnnnnnnntggaagcttgggtcttcgccgcattcgagactgggaaatacttgggtcttgtgaacgctggtcggacttccgagtcttggatcaaggcgttgtctgccaaacgcagacggcaaccgctggtctcggacatgaaggccgtcaccgtatcgcccaagttgcttccggctgctgcatacgtcgctgtgctccagaccatgttaatggatgccggcttcgagtttcgcaatgtgattcctacgtggagtgaagtccgtgcggtgtccgaggtgtctgagaatctgatccgccgaggtgttgaagaagttcaactcagactcgcagttgcgagtcttgagtggaacaagctgatggatggcgtagggtttcacatccgacagccgctggagcctctcccagctgtgcgactctccgagcgaagtacaagttccccgactgatggcgatggagacgtcctaatgacggacgacgccgtggaactgcttggcgaagaattgtttcgccgcttgaggatcacgcggaccagaagaagaagtcctgcttcaagcgtgtccggacaaccagcgcccaagcgtgcggtctttgaagctgagcgatctccgcccagttccctgatgcctccgacatcgtcgtcccagagtctggtgccccaaccatcggtatcccagaacgtcgtgcctcggactcagagcctagtccctagagctccaagtcttgagctgatggcgagtgtggactcagttcctagtctggtgggaccaagtggtgcttccgacgagtcgatgaacgcggccgctgaaggaacagacctgtcggggcacagctcctcaggatcgtggttcttgtccgccgcggactacatggttggcagtgccttgagtcatatgcctggaccaagcccgatggcgatggtaatgattgcgcaggagagcgcggctgcggcagctgccgacccgggtttcggtgtctcggcaggtgctgtgtcgtatccagtgccggtttcagcacgccctgcaccttcgctgcaaccccttcaggaatcgcctgcgcatgtaccgctgcccgagtcatcagagagcagcgcaagtctccagcgagaacactcgacgcaacctgctcccgggttgcatccaacgtcgttgccccctccaagcttcgtgtcttccaccacacccgcagccggcatgaaccgtggtgtctccacatcaagtgctatgccacggactcaagccacttcgacaaaggtcgcggacccggagtctgagaagaaaccacagaagtccgtgcattctgggaagtcatcgcgatcccggaagtccgccgcgaaatctgcgtcgtccaagtcttcgatgtcaggaatctcctctcgtgtgtcgtcctccaggtcgtcgcgttccggcgcgtccgaggtcgccctaggcagcaggaggccgccctcaaccaagtacgcgccgacatggctgacgagttgcgtggcattcgcctagacaaccagcagcagaccgcttccctcatggagcgtcttcaacggagcgaagtagcccttgccgccgaacgtgagtcccgccgtcgcgacgccgaagttgctgaagctcgggttgctgccgcggtgaaggtagagcagtccccagtaccatcgtcagtgcctgcacccgagatggggcgcggcacacttattccccccgaagcgccattgccgagtgcggccctggacgccgccaccgctgcggtgttggcggcagccgaggaagtgaaggcagagagtgagggcatcgcgcagagcacgaaagcccatttggccgcgttcgaggaccagttgcgcaatgtcacgtccgcgtatctgcagaagtgcgccctgacccagaaggttcaacgtgagaatgatgctcgcctaggtcaacaatcgactagtgtacctgaatctagtggaaaagccaccgcgacgagtcgcacttcctgcgacaaatttgcgggacggtcgcccacttatatcgggcaacagcaagtggccgcggattcgctggcagcagcgcagcttcaagcgaccatacaagctccaagtcaaattgtcaaacgcgagatgggaccaggcgagacgaagccgactgagacacgtgagacaaggtcaagtgagacgaagacacgtgcgactggcgggacggggtcaagtgagaccaagcggggaaggcagccgaaggctgcgtcacagactcggtccagtgtcgctgcagtcaaggaagaaaactcggaagagaccaagagctcagcgaaaggtgtcgctcgggactctgcgagtgggagtggctatgtccccagatattctgggaaattaactaataaaaagtcttcccagaaacacaagcgtggaaagaggatccgtcgcagtaagcgaccaggtggcgatccctcatcgtcagattcaagtacaagtggcagcttgtctagcagcgagtccagctcgggctccgactccgactgggagcgcggccttgctgaggaaatcgcccctgcaacagtaccagccgctaacggccaatcgtacacgttccgcccgtatatccagtatggggcggtggagatgtttgatccccacgccaagctcgaagaccgcgtgaactggtgggagcggtttgtctacgctgctgcgttgggagtctggccggagaagatgaagttgcgtcagatcctgggccgactacctgccccgctacgtgtatggttccgccaactacccgagaaggaccagaaggactggtcgcgcttgtcaagctgtttcgcaaggagtactgccgcaccaaggcgtccccgtacgaccgctattatgagttgggaccggagaatggcgagtctgcgcgatcgttcctgtatcgactcaacgctgcagccaagaaggccgacgtcgagtacgaagactctccgaggaactccacatccgtcgctttatcaagaagctggcggatcgtcgtctgaagatcacagtacagggacaaacgttcaagtcgatgaaggaactcgagaaaactctcaagcgtatcgaagcggtgcagcgtgatgatggatatgagacgcctccacctccaaagatccgcgatacgaaacctagtggtgtgagatttagtcaattccctcctccgcgtcgaactcaaggtgaacgtgcgtacttggtcgagaacctggactcggagtcagaagacaaggcttccccgccctcggactccgaagagaaaccagaaccacgttatctcccgggaactccgcccccgtccatggggcgtacggtgaattctgagaagatcaacgtagcccaggcttctgagactatcgctcaagtacccagacccccgacgaccgaggaggtgttccgtgctgctgagcagatgggttggcgccctccaattccacaagcgcgaccaccatctccataccgagacaactcccaaagaactcccttctgtgaaaattgccgcagttttgggcacgacgctcagaattgttggcgggatctgatctgtgaccgatgccatgaagctggacacccgacatataagtgctcgcgtcgcccatgttccaagtgcggagactttcaccgtgaagggctttgtgccgattgggctgctttgaaggcagtccgggaattggcgcgacaaggagcgctgcaagacttgccgaccgaagctctgaagcaactgatgagagaacgagagaacagccggctaagtctgggacgtcgttaaacaactaggctcgctgggtagggacccagtgcgtgtcgagcctaagtaccaagcgtattgcgctcttgcatttgtcggtccagaacgtaggcaccagatcggtaacccacaatgcatgactgccattgcatgtgaagatgaatcgctgttggaatcgcgcccggtttctcgaaactacgttttccgaggttctgcatttgaagatgaagccccagtggaattcacattgaacccaggagaacgttacaggtggtgggcagaccacgacttggataatcaagatgcagtggcattagtgcatggggcgacaacaactatcggacacacatcattctagattccggcgccagcacaactatactgagcccagaccttgcacgcaggttgaagcttaaggtgacgtcgcacgccggactcatgtgaaaggtatgagtgaagttaactctgggaatgcgtgtggtatatgtgctggacatatgggttggaaacattggagatggattcgcttgtctgctgggtatggatttcatgaaagcggctggagtacgactgtgtgcgcgtgagcagttggctaatcttccgaatgaagaagacattcctctggttggagagaaggaagctccacgttacatcttagaagtcccaatttgtgtgcgtgagccggtgtatttggctcctggtgattcgatcattgttccggtgcggtatggtcaagctgacgctgacacagctgaggtatggactgcccgagggagcctgtgggtgacgcaagtgatctacagctccagacggcggcctgctgcagttcgtgtggtcaatatctcagagaagtggacccagatcatgcagcacacggtggtagcagcgttggtggataccacgaggagaccgctttgttcaaccgaagtcgcgtaagtatcaagagtggcaacaagagatttaccagaacaccccttcgcgggagtatcggcgacgggaggagctggaagcacttgaagccgaacggaatgccccacccgcagtcctgcgacctcaatatgtttggccgacgaagattttgccacgtccacctgaagaagtccggaaggctgctgagctacagaaatctcggaactcgagtggccgagccatgagctcttcgggtcagactgaggaaaagaccggcagtcactcgagcgctgttgctgatgtaaagattctggatctgggcattctaactgccgtggaagtcactcccatggacgaagccgaggcctcgcaggcagatgaggtagatcctgcgaaggagcccgccattgatcgggattctgatgatgtcaaccgcggactgactggtggaggtaccagtagtaccgaagctcgacatgaattgaagaacgtgtttcgcgcagagccagtcaagatctgtgaggatgccctggagcagctggaggtggcgtacgcgatttgtcttcgggtggtcacagctgacttcgatcctgatgaagaagtcttcttccatgaaggaaccgagctgttgacgcagttacgagaccagttggctgtactcccagacttgaaggatctcagcccgaaggtgaacatggatgaagctgatgtgggtgtcgaaggcaagaccactcctgagatgaccaaggagatgagaggtatcttggaatatcatcactcgatcttgctaggagatggaactgctgtccctgcacctgtcagaggagttgtctgcgacctggatgttggggacgcaaaacccattgcccagcgcgctcgtctgattgctccacgcttcctccactaagtctacgagctgatcaaaaaattgttggagaccggactcatcgagacttcgcattcggagtgggcctcacccatcgtaatcattttgaagaaggacggcagggatatcagactttgtatcgactaccggatggtgaaccagctcatcaagctgtcttgctacccgctaccgttgatagatgacttgctgattggatttgaagctgcgatgtggtttatgagcttggatatctcgagtggcttctgggcggtgcccatgacccagagggcaaaactcatttctgcttttgtctgtcctcttggacactaccaatggttgcgcatgcccttcgggttgaaaaatgcacccctgatataccagcagatgctgaacaactgtctttggggttttgtgcgactatcgcctgaggaagaagccaaggtcgatcccgatgtgcttgagtttctgggaattaaggtagacgagcgagcggtccccgattctggagtggagatcccagctctgacagatacaatgactgttttccaccggaacattccagccccagtttcaatgggcccagtcctgggtagaagctcatacattgacgacatcgcccatggggcgcctacctgggaccaactctgctcggacctgaacgcgttgctgttccgactacgctactggggaatctccgtgagcctgcccaagagcgagttcgggaagctgtctattccgtacctgtcgcatgaaatcagcgccgaaggctttcgagcgaaacccaagatcgcgaagggtgtgaatgatttgctatttccgtcgacactcaaaggcgtgcagtcatttctgggaagcatcaactactacaacaagtttatcgaaggtcttcctgttatagcatcggtgctttacgagctgaccgaggagcaagtccgggaaggacgagacttggggcgcgccaaagaggctttcgagattctgaagaaaaagatcgtctcaacgccgctgttacgacacccggaccgagagaaggactttgttgtgatcctgcatgcgaatccttgggctgcaagtgctgtcttgggccaataatatgacggtgtgatttttcctgttcggtacacgggcaaaaccctcaatgagtctgagattaagtatcatccggctgagaaagaggtggtggcgttgttgcgcgtcctgcgagtgtttcattgtatgcttgctgggagtcacatcaaggtctacactcgttactcagtcctgcggtggattttcacttcgtcatcattggagggacgttgtcaacggtgggccaccctgctctcgccttgggatctagaaattcaccggattgcgagggacgaggatggcctggcagccatcatgggcgctgggattacgcctcgtgaacatctcgataaagtccggtcatttctgggaagcatcaactactacaacaagtttatcgaaggtcttcctgttatagcatcggtgctttacgagctgaccgaggagcaagtccgggaaggacgagacttggggcgcgccaaagaggctttcgagattctgaagaaaaagatcgtctcaacgccgctgttacgacacccggaccgagagaaggactttgttgtgatcctgcatgcgaatccttgggctgcaagtgctgtcttgggccaataatatgacggtgtgatttttcctgttcggtacacgggcaaaaccctcaatgagtctgagattaagtatcatccggctgagaaagaggtggtggcgttgttgcgcgtcctgcgagtgtttcattgtatgcttgctgggagtcacatcaaggtctacactcgttactcagtcctgcggtggattttcacttcgtcatcattggagggacgttgtcaacggtgggccaccctgctctcgccttgggatctagaaattcaccggattgcgagggacgaggatggcctggcagccatcatgggcgctgggattacgcctcgtgaacatctcgataaagtcgcagaatccctgattacaaggaaaggacgagtgacacctgccccaccgattagtctggagatgttggaagaggatttctcaggttacctgctcagctttgatggcgctgcgaagacgtctaccaggcaaggtagctgtggttgtatcttgtggaagctaccagagtggactgtggtcagcgcgtgaggttacttcctggaagatgtgacggtcaatgatgcagagtatcatagcttgatcaaaggagcgacacgggctatggagcatggtgtttgcgacttggttgtcgtcggtgactcccgaatcgctattcaacaggcccaagagttgatcaactgtcatcaaccgaaccttcagcgcctgttaagtgagttcgattcggttcgtcagaagttccagtctgtgaagttgattcatgtgaagcgggaattcaaccaggctgcggactatctcacgagtcggactctagccgctggagaatcactggttatcgatgatccccttgagctgtcgcatttgcgtttggtgaatcgcatccctgagaagctggtgaaacagtctgaatctggagttgtcgatccattggtcgaaggcactgctgagcgtcgagtactgagagcagtcgtagatgagttcccagattatgacaacgcaccactttctcttggcgcgcgcgtgctagccgctctgacccggagccaagcccaagcggaagttcgtgatgcagaggagacggagtctgataccccaggcatgacacctttggagttccaagcagagcgctggcgccgcattaaggctcaccaagatggcgacccatggatgcgacagttgaaagctttcctacgaggtgatctctctgaactctctgaactggaagcacagaggatggcgaagattgctgacaattatgtcttggattcccgagacgttatgtaccatctgagccgatcgactgcttctaggccaagagatgcacgagataaacctcgattagtggttcctcacgatctgtgccaggacttgctgcatcactgtcacgaagagcttcatggcggtcaccaaggaattacgcggacgcacgaacgcctgcgtcgagagttcttttggccaggtctctacgctgatgttgaacgttttgtcaaggagtatgtggactgcgcctctggaaaggggaagccccctaatcccgggccgtcgcctgggaatattgagcccaacgctccgttcgaagtgctgtcgatggactttgtcacgcacctcccgaaatctgaacgagggaatacgtttctcttgctttttcaagatatgttctcgggtttcgtgatgtgtaagcccatgagttcgacgacagcacaagacgtagctgaagcctatgaagaggctgtcttccggcgcttcggtgcgagctccatgctcaggcacgaccaagaccccagacttatgagcgaagttttcagtcgattcagggaaatactgggcaccaaacagcgagcgacgttggcgtatcgcccttaagccaatgggcaacaagaaatatcggtgcagactatggtgaggagcatccgggcctatgtagcggaagcagatcagagcgactgggatgatcatgcggagaagttggtgttcgccttaaacacctcctttgattcgacccggctcgaaacgcccttttatctggtccatggctgggatgcgaagagcattgtgtcggctatgctaggtccaccacccacggggctggaacagaagtcggcttacgagtggagacgcaaattgcaacgcgattatagtttcgctcatgcttgggctcgagacttgcagaaggaagctaaacggctgcgctcagaagcccagactcggaaatggcgggaactatcgggaaaactcaaagctggattccaagttggtgactctgtctggctgtatctggtccgtgtgcaacccgggttgaccaagaaattcgcgcgtatggggatcnnnnnnnnnnnnnnnnnnnnnnnnnnnnnnnnnnnnnnnnnnnnnnnnnnnnnnnnnnnnnnnnnnnnnnnnnnnnnnnnnnnnnnnnnnnnnnnnnnnnnnnnnnnnnnnnnnnnnnnnnnnnnnnnnnnnnnnnnnnnnnnnnnnnnnnnnnnnnnnnnnnnnnnnnnnnnnnnnnnnnnnnnnnnnnnnnnnnnnnnnnnnnnnnnnnnnnnnnnnnnnnnnnnnnnnnnnnnnnnnnnnnnnnnnnnnnnnnnnnnnnnnnnnnnnnnnnnnnnnnnnnnnnnnnnnnnnnnnnnnnnnnnnnnnnnnnnnnnnnnnnnnnnnnnnnnnnnnnnnnnnnnnnnnnnnnnnnnnnnnnnnnnnnnnnnnnnnnnnnnnnnnnnnnnnnnnnnnnnnnnnnnnnnnnnnnnnnnnnnnnnnnnnnnnnnnnnnnnnnnnnnnnnnnnnnnnnnnnnnnnnnnnnnnnnnnnnnnnnnnnnnnnnnnnnnnnnnnnnnnnnnnnnnnnnnnnnnnnnnnnnnnnnnnnnnnnnnnnnnnnnnnnnnnnnnnnnnnnnnnnnnnnnnnnnnnnnnnnnnnnnnnnnnnnnnnnnnnnnnnnnnnnnnnnnnnnnnnnnnnnnnnnnnnnnnnnnnnnnnnnnnnnnnnnnnnnnnnnnnnnnnnnnnnnnnnnnnnnnnnnnnnnnnnnnnnnnnnnnnnnnnnnnnnnnnnnnnnnnnnnnnnnnnnnnnnnnnnnnnnnnnnnnnnnnnnnnnnnnnnnnnnnnnnnnnnnnnnnnnnnnnnnnnnnnnnnnnnnnnnnnnnnnnnnnnnnnnnnnnnnnnnnnnnnnnnnnnnnnnnnnnnnnnnnnnnnnnnnnnnnnnnnnnnnnnnnnnnnnnnnnnnnnnnnnnnnnnnnnnnnnnnnnnnnnnnnnnnnnnnnnnnnnnnnnnnnnnnnnnnnnnnnnnnnnnnnnnnnnnnnnnnnnnnnnnnnnnnnnnnnnnnnnnnnnnnnnnnnnnnnnnnnnnnnnnnnnnnnnnnnnnnnnnnnnnnnnnnnnnnnnnnnnnnnnnnnnnnnnnnnnnnnnnnnnnnnnnnnnnnnnnnnnnnnnnnnnnnnnnnnnnnnnnnnnnnnnnnnnnnnnnnnnnnnnnnnnnnnnnnnnnnnnnnnnnnnnnnnnnnnnnnnnnnnnnnnnnnnnnnnnnnnnnnnnnnnnnnnnnnnnnnnnnnnnnnnnnnnnnnnnnnnnnnnnnnnnnnnnnnnnnnnnnnnnnnnnnnnnnnnnnnnnnnnnnnnnnnnnnnnnnnnnnnnnnnnnnnnnnnnnnnnnnnnnnnnnnnnnnnnnnnnnnnnnnnnnnnnnnnnnnnnnnnnnnnnnnnnnnnnnnnnnnnnnnnnnnnnnnnnnnnnnnnnnnnnnnnnnnnnnnnnnnnnnnnnnnnnnnnnnnnnnnnnnnnnnnnnnnnnnnnnnnnnnnnnnnnnnnnnnnnnnnnnnnnnnnnnnnnnnnnnnnnnnnnnnnnnnnnnnnnnnnnnnnnnnnnnnnnnnnnnnnnnnnnnnnnnnnnnnnnnnnnnnnnnnnnnnnnnnnnnnnnnnnnnnnnnnnnnnnnnnnnnnnnnnnnnnnnnnnnnnnnnnnnnnnnnnnnnnnnnnnnnnnnnnnnnnnnnnnnnnnnnnnnnnnnnnnnnnnnnnnnnnnnnnnnnnnnnnnnnnnnnnnnnnnnnnnnnnnnnnnnnnnnnnnnnnnnnnnnnnnnnnnnnnnnnnnnnnnnnnnnnnnnnnnnnnnnnnnnnnnnnnnnnnnnnnnnnnnnnnnnnnnnnnnnnnnnnnnnnnnnnnnnnnnnnnnnnnnnnnnnnnnnnnnnnnnnnnnnnnnnnnnnnnnnnnnnnnnnnnnnnnnnnnnnnnnnnnnnnnnnnnnnnnnnnnnnnnnnnnnnnnnnnnnnnnnnnnnnnnnnnnnnnnnnnnnnnnnnnnnnnnnnnnnnnnnnnnnnnnnnnnnnnnnnnnnnnnnnnnnnnnnnnnnnnnnnnnnnnnnnnnnnnnnnnnnnnnnnnnnnnnnnnnnnnnnnnnnnnnnnnnnnnnnnnnnnnnnnnnnnnnnnnnnnnnnnnnnnnnnnnnnnnnnnnnnnnnnnnnnnnnnnnnnnnnnnnnnnnnnnnnnnnnnnnnnnnnnnnnnnnnnnnnnnnnnnnnnnnnnnnnnnnnnnnnnnnnnnnnnnnnnnnnnnnnnnnnnnnnnnnnnnnnnnnnnnnnnnnnnnnnnnnnnnnnnnnnnnnnnnnnnnnnnnnnnnnnnnnnnnnnnnnnnnnnnnnnnnnnnnnnnnnnnnnnnnnnnnnnnnnnnnnnnnnnnnnnnnnnnnnnnnnnnnnnnnnnnnnnnnnnnnnnnnnnnnnnnnnnnnnnnnnnnnnnnnnnnnnnnnnnnnnnnnnnnnnnnnnnnnnnnnnnnnnnnnnnnnnnnnnnnnnnnnnnnnnnnnnnnnnnnnnnnnnnnnnnnnnnnnnnnnnnnnnnnnnnnnnnnnnnnnnnnnnnnnnnnnnnnnnnnnnnnnnnnnnnnnnnnnnnnnnnnnnnnnnnnnnnnnnnnnnnnnnnnnnnnnnnnnnnnnnnnnnnnnnnnnnnnnnnnnnnnnnnnnnnnnnnnnnnnnnnnnnnnnnnnnnnnnnnnnnnnnnnnnnnnnnnnnnnnnnnnnnnnnnnnnnnnnnnnnnnnnnnnnnnnnnnnnnnnnnnnnnnnnnnnnnnnnnnnnnnnnnnnnnnnnnnnnnnnnnnnnnnnnnnnnnnnnnnnnnnnnnnnnnnnnnnnnnnnnnnnnnnnnnnnnnnnnnnnnnnnnnnnnnnnnnnnnnnnnnnnnnnnnnnnnnnnnnnnnnnnnnnnnnnnnnnnnnnnnnnnnnnnnnnnnnnnnnnnnnnnnnnnnnnnnnnnnnnnnnnnnnnnnnnnnnnnnnnnnnnnnnnnnnnnnnnnnnnnnnnnnnnnnnnnnnnnnnnnnnnnnnnnnnnnnnnnnnnnnnnnnnnnnnnnnnnnnnnnnnnnnnnnnnnnnnnnnnnnnnnnnnnnnnnnnnnnnnnnnnnnnnnnnnnnnnnnnnnnnnnnnnnnnnnnnnnnnnnnnnnnnnnnnnnnnnnnnnnnnnnnnnnnnnnnnnnnnnnnnnnnnnnnnnnnnnnnnnnnnnnnnnnnnnnnnnnnnnnnnnnnnnnnnnnnnnnnnnnnnnnnnnnnnnnnnnnnnnnnnnnnnnnnnnnnnnnnnnnnnnnnnnnnnnnnnnnnnnnnnnnnnnnnnnnnnnnnnnnnnnnnnnnnnnnnnnnnnnnnnnnnnnnnnnnnnnnnnnnnnnnnnnnnnnnnnnnnnnnnnnnnnnnnnnnnnnnnnnnnnnnnnnnnnnnnnnnnnnnnnnnnnnnnnnnnnnnnnnnnnnnnnnnnnnnnnnnnnnnnnnnnnnnnnnnnnnnnnnnnnnnnnnnnnnnnnnnnnnnnnnnnnnnnnnnnnnnnnnnnnnnnnnnnnnnnnnnnnnnnnnnnnnnnnnnnnnnnnnnnnnnnnnnnnnnnnnnnnnnnnnnnnnnnnnnnnnnnnnnnnnnnnnnnnnnnnnnnnnnnnnnnnnnnnnnnnnnnnnnnnnnnnnnnnnnnnnnnnnnnnnnnnnnnnnnnnnnnnnnnnnnnnnnnnnnnnnnnnnnnnnnnnnnnnnnnnnnnnnnnnnnnnnnnnnnnnnnnnnnnnnnnnnnnnnnnnnnnnnnnnnnnnnnnnnnnnnnnnnnnnnnnnnnnnnnnnnnnnnnnnnnnnnnnnnnnnnnnnnnnnnnnnnnnnnnnnnnnnnnnnnnnnnnnnnnnnnnnnnnnnnnnnnnnnnnnnnnnnnnnnnnnnnnnnnnnnnnnnnnnnnnnnnnnnnnnnnnnnnnnnnnnnnnnnnnnnnnnnnnnnnnnnnnnnnnnnnnnnnnnnnnnnnnnnnnnnnnnnnnnnnnnnnnnnnnnnnnnnnnnnnnnnnnnnnnnnnnnnnnnnnnnnnnnnnnnnnnnnnnnnnnnnnnnnnnnnnnnnnnnnnnnnnnnnnnnnnnnnnnnnnnnnnnnnnnnnnnnnnnnnnnnnnnnnnnnnnnnnnnnnnnnnnnnnnnnnnnnnnnnnnnnnnnnnnnnnnnnnnnnnnnnnnnnnnnnnnnnnnnnnnnnnnnnnnnnnnnnnnnnnnnnnnnnnnnnnnnnnnnnnnnnnnnnnnnnnnnnnnnnnnnnnnnnnnnnnnnnnnnnnnnnnnnnnnnnnnnnnnnnnnnnnnnnnnnnnnnnnnnnnnnnnnnnnnnnnnnnnnnnnnnnnnnnnnnnnnnnnnnnnnnnnnnnnnnnnnnnnnnnnnnnnnnnnnnnnnnnnnnnnnnnnnnnnnnnnnnnnnnnnnnnnnnnnnnnnnnnnnnnnnnnnnnnnnnnnnnnnnnnnnnnnnnnnnnnnnnnnnnnnnnnnnnnnnnnnnnnnnnnnnnnnnnnnnnnnnnnnnnnnnnnnnnnnnnnnnnnnnnnnnnnnnnnnnnnnnnnnnnnnnnnnnnnnnnnnnnnnnnnnnnnnnnnnnnnnnnnnnnnnnnnnnnnnnnnnnnnnnnnnnnnnnnnnnnnnnnnnnnnnnnnnnnnnnnnnnnnnnnnnnnnnnnnnnnnnnnnnnnnnnnnnnnnnnnnnnnnnnnnnnnnnnnnnnnnnnnnnnnnnnnnnnnnnnnnnnnnnnnnnnnnnnnnnnnnnnnnnnnnnnnnnnnnnnnnnnnnnnnnnnnnnnnnnnnnnnnnnnnnnnnnnnnnnnnnnnnnnnnnnnnnnnnnnnnnnnnnnnnnnnnnnnnnnnnnnnnnnnnnnnnnnnnnnnnnnnnnnnnnnnnnnnnnnnnnnnnnnnnnnnnnnnnnnnnnnnnnnnnnnnnnnnnnnnnnnnnnnnnnnnnnnnnnnnnnnnnnnnnnnnnnnnnnnnnnnnnnnnnnnnnnnnnnnnnnnnnnnnnnnnnnnnnnnnnnnnnnnnnnnnnnnnnnnnnnnnnnnnnnnnnnnnnnnnnnnnnnnnnnnnnnnnnnnnnnnnnnnnnnnnnnnnnnnnnnnnnnnnnnnnnnnnnnnnnnnnnnnnnnnnnnnnnnnnnnnnnnnnnnnnnnnnnnnnnnnnnnnnnnnnnnnnnnnnnnnnnnnnnnnnnnnnnnnnnnnnnnnnnnnnnnnnnnnnnnnnnnnnnnnnnnnnnnnnnnnnnnnnnnnnnnnnnnnnnnnnnnnnnnnnnnnnnnnnnnnnnnnnnnnnnnnnnnnnnnnnnnnnnnnnnnnnnnnnnnnnnnnnnnnnnnnnnnnnnnnnnnnnnnnnnnnnnnnnnnnnntaggccaagagatgcacgagataaacctcgattagtggttcctcacgatctgtgccaggacttgctgcatcactgtcacgaagagcttcatggcggtcaccaaggaattacgcggacgcacgaacgcctgcgtcgagagttcttttggccaggtctctacgctgatgttgaacgttttgtcaaggagtatgtggactgcgcctctggaaaggggaagccccctaatcccgggccgtcgcctgggaatattgagcccaacgctccgttcgaagtgctgtcgatggactttgtcacgcacctcccgaaatctgaacgagggaatacgtttctcttgctttttcaagatatgttctcgggtttcgtgatgtgtaagcccatgagttcgacgacagcacaagacgtagctgaagcctatgaagaggctgtcttccggcgcttcggtgcgagctccatgctcaggcacgaccaagaccccagacttatgagcgaagttttcagtcgattcagggaaatactgggcaccaaacagcgagcgacgttggcgtatcgcccttaagccaatgggcaacaagaaatatcggtgcagactatggtgaggagcatccgggcctatgtagcggaagcagatcagagcgactgggatgatcatgcggagaagttggtgttcgccttaaacacctcctttgattcgacccggctcgaaacgcccttttatctggcccatggctgggatgcgaagagcattgtgtcggctatgctaggtccaccacccacggggctggaacagaagtcggcttacgagtggagacgcaaattgcaacgcgattatagtttcgctcatgcttgggctcgagacttgcagaaggaagctaaacggctgcgctcagaagcccagactcggaaatggcgggaactatcgggaaaactcaaagctggattccaagttggtgactctgtctggctgtatctggtccgtgtgcaacccgggttgaccaagaaattcgcgcgtatgtggcatggtccctttcgaattgaagaattccgcgatgatttccgcgtacggctaaagatcgaaggcaccggctatcgaataggtccctgggtacacatcagcaggttgaagccggggcgctcttcccagaacgcccaacggtggagatcgaagtggccgaagaggatgacttcgacgcagcattattaccagaagatagctgggatcctaaagagcaatccggcgtgtacgaggtggggattatcaaagacctccgctggacgaagaggaccagaaccgcgcgaagagttcgtgaacatctcgtgaaatggaatggatactcagatttggaatggctcccggcgacgcagctaaattggggtaacctgctctacgagttcaacaagggcgctaaggcgcggactcgatttcgcgcgatgcaagcaggtggtgattccgacgctgtggggaacccccagtagttctgggattcaggcgctggatgtgattatatgtgcacgagtctgacgctatgacgacttgacccgacaacgacaaaatggattggttccagaatgatgaatgacttttgaagtgatgatttggcgactggagatgaagcgtgaccaacgggagtgtagcgtgaagcccaactcgacagtgacacgcgaagattgccgcaggtggtgaccgctgcaacgaccgtcgaacctgcattgtatacgctgcttccttgcacgtgctggtacatggagctagggcgagtggtcatgcgagctgcgcggggctgctagcgctcggacgcctccctttcaaaggcgcgcgcgcgtggctccgttcctgctgcgcaaggccgctttgctggtgatgatcgggttgcttcaacccgcgtgtcgtctgagtacctcgcggcccagactagagttcagatgttggacagttagacccatctcgactctccagttgcctccgtggctcgaattggccaatggggggttgtgacgcggtgtcgatccctaaattcgggtgaatgcacctgaccctgggaagtcccaatgatatggagcttggtgatactggatgatttggagtctcctataaaaacaagggtaatgtctgcgaatggacgctgaatcccggaagatagatcaatgtgggcgagttgatcccgttccatgaagtgcaacggaatacgagcgatcctccccagtatatctaagtacggcggaactcgactctggcttacaacctgggagctgaggcacttctcagattctacgttgttttcccggaataacgattcccagacttcgcgttcccagacttacctcccacaaaattccaagaacgacctcggcttgaggcgttccgaggctccaaacccaagaacacttggtttcactatggcatcttccaagatcctaggtgtacccaacaacccgagaaggtatccagtttggcgacccttcaaggtcagaccaacactccgcagaaagatcgcagtctccgaagggtcgcttaggaaagatttcgtctgcatgtgacctttaaccaaacagaattcgttttgcttcgaagggcacaagtgcttctttcacagcctggaaggccgttctccacgacaaaattcaaagcactttaggtaagtgatccactgcttcggcctggacgtgatcatatctattacatatctgtatatttggcggattgcagaccgtctttgttgtatatttgcggtctattgggcctgtgtcgaactgaagaagttggcgacagggtagatcgtttcctctctccgagaggtggtgcgtgttcccaagattgatcaagtgtcttggatttggaccagttgacttgtattttggccttagccttgggcctagagaaagaagagagggcaaagaagtatttgtgtgattgtataacgtgtacaactctattcgggttggattgttccagcgttagcccggcgtagctgtctgattcacggggtcgatactaacctcctggtgaaaagaatcgctacccaagggatacacatcgtgcgcctgaccaacagcgtgtactggacaacacacaccctgtgccagccgagacggatccaaagctctagaagcctgaggtctgtcaaggagggcctataactgttttctgggagaaaacaccgcatcgcctcgtcacacaagcgcaaatcgctcatcacgatacagacgggtgtggtgttcgactcggcgcccttcatgcgcttctatagttccgtgatcaaacagcccgacagctcttacgccattggaagcgcggcttgggttgtgttcgccggtgcacacccgaagaacgcgttgaataaggtttcgtctttctgcgacgtcgagatgcaagaccccagcggctcgatatccaccgtgctgaccgacgtgcactgggacttgcgctaccactggcagcgccacctcatttccgagagcaagaacaagtgcgagtggaacatccgccccggcggccgcacgagcgtccctgacacctaccgcttcgtgcaccgcgggtactcgaagaacttgctgggcaaactcaaggagtacacggcaacgtccaacacgttcaccgtgactgcgtaggctacggaggtctttgaacacgtcattttgctgtgcggctctttgattggttgctagcttcaacttgatttaacccttgattatgatggcattcaccgagttatggatgtctagcttagagctagcacttttctggtactttttcaagtagggaaaaagtgttttcccgctgaacggctaagacttcgtgcgtcatgaccaagcctcgacgatacgacgcgcctcgttgccgcgtggcaacatcggtgccatcctcgccgctcatcggaccaatcaagtgtatgtgtgtgtaggtggcctggtttcccgcttagatacgcccctacagaatgcagtgtccggctgggcggattttcccagcgctaggtaggattagctttggcaatccgctcatttgtggtcttccctcgcctcggacaagcagcgcccaagcccaacaccgagcgcggcccagcacgagtcgctgccactgcgcgctcgcaaaacccaccacacctcacccggggctgcctcagctcagctctctgcgagccccgagctgaggcttgccttctctagtactgaacggattgccttgccccacgcacaagtgttgagagtggatgcggaaaacgccaataattgaagttcaatagtcctcttcgttagaaaaactcgacagagttttaacgataccacccgtgcggaattctataggcgtggtatagttggcaacatcacgcgcttttctcagttgagtaccgtactggcaattccctcgagcttccagggagctgggatggctggtgtactgtaggatagcacgagaacgagcagcgttttacaagaactccaaactcgttcctactacgcttatctgctcgcaccatttcactgaagtgtaggttgcggaagcaacagaggtaacataggttagagcagttgctgacaaaggcggtgtttcccgctgtcgcagttaggctatagttagaccgggagggactccgaagcgagtaggctccagtcctgctcattcgcgaatttcctcgccgcagttaaaacctccaagcctgacgacttctcggacctcctgtcttgccccgcatggccccaagctatttttaccttcggccgggcgttttcaacctcgtgggcttctcgtacggcaaggtggacggcaccctcgcacgcggagcgaaggtgaaggtaaagctggtgcagagtgggcgctggtcggaggagccctcgcaagctgtcgagcttccccaggaagagctggccctaagagtcgtgtcagccgcagaagccgagaatggtgtcggtacgtttgtgggtggcgtcatctgcatgtcacgggtccgccccggaacagctcgggtctgggattacggcttagtgatcggatacagctgggaacctgagctgcaacatggcctgcttgatgtgaactttcgtggtgttgagacctcgttgaagttcgtatcggacactactcaggatgttgcagtcgagatttatgcgttatagccgtgtgccgggcaaagcgcgagcttcgtgatggccggagagatgaggcaaatacacgacaaagtgtataacaagttcaatgggatcgaccaaccagcgatcagagatgctacacagctgctggagggggtccggagtgatgaacttgacgaggcccgaattctgcctctgcttgatattgggaattttgccatcgcagaggtctcagtccagcacatactcgactacgtctactacaaggacggtgggcggccgcacccatcggaggcaatctttggtgacaccatctttgacaaaccgatcgcgcagcaggaaccaagaacccttgctgccactgaggtcgtgcttagcgatggcttgagtgactctgacgacgatgccgccgaccctcctaccgctcacagtggtgtgagctcgactcagcaacgtgaaacgaagcgtcggcgtctaaacgtacaagggcggacagctttgccaggctcaattcactcggacacagtattacatggagtaggtggaaagtcgcagagtacgcgggatgtcgatcaactgatcgctctgcagcgcaatgcttcgacaactgatactctgggtgcagcggcagcccgacgcgaagatggtagtggcgataaaaatcaatttcccgcgacgggcatgcagacgactattcacgtgggattagttgacggtaagtacgcgtcaatgacggcgcagcggtttgtggagttcgttcaaattcattggcgaaagtttgtttttttccatcaccctgctgtcctgcgtgcgctatttggttgggatttcggtacgagaggactttcaattttacatttcggccgcgtgacagagctggagaagaggaagcgtgttcgagtttacgacatgagcaacttttccaaaaagaacagcctgcatcctgcgcaacctcctgctgattttactactctgattgggtgtgtcgacgtcctgtgtgccattacccaactcctctacaagcccgtggttcacgagacgctgaaagccgcctccgacttcctcggcgagttgcgactgagcgagttgatggcttcccaacaagctttgaccgaaattgcagcctgggtcgacgatcagctggaattgtttcggctagctattacggatgagaattggaaagctgtcgcggatatcaagacatatttctgtgcatcacacgacgcctttatccgggtgcatcaaatgattctgcgccatgatgtcatcgccgctgtaaagtcaactcactccagctccggtcggtcagagcatcactcgcggggcggacgaaccatcaactcggacaagcccattccgattccgcttgaagttcggcaggcgcttcctaaacaaggcaaccagcagatttgcctgaaatttctatctgcccaaggctgccggggaaagaacggcaactgtgtaatcaagcatctttgccatttcaagccggcagcgctgccggaaattgtacgcgacttccttaccaagaactacggaggcctttccgcagacatacagtgacggtgtcgggcacggaacgtaggacctactcgcacccccagtgcatcggggtcaattaatcggcaacggtatatacacccacacgctgttcaaccaccattcaggtctatctttccgtgtcaaaacaccaccgggccgctcgatcgactcatgtcgatgagcccgcccaccatcgggccgttcggtcgactcatgtcgtcgaacccgtccacactcgggccgctcaccgacccatgtcgccgagcccgtccaccctggggtcacccagccggtacaagccggcgggcccaccctcacttgaagcaatgagtcgcgcgaaagcgaaggcgacaaacagcagcctctcgcttcgtcggctgatgcaccatttccggccgctgactttattcggcggcgccaacgaaggttcgatactaccagcctcgcccaccgccggttagcagagctgcacgttgacactgctcggattaggctgattagcgcgctaagacgacaagccttatcaccgccacaaccaatggcgtcgacagtaacgcaacggggccacacgaagtacctgctcgaccgaaacaatcagtccgtctacagtgagttcatacggcgctctggtatgcagctgcccgaatttgttcgactgctgcgaggcgagactgagcatgacccccgtcccaataaatcgctgatcgagccaacatccctatcagcatggcaaagttaccgctacaaaactcagtgggccgagattgtgcagcacggggtatgttcccggttgacatcggggttcgcaatacaagacgcaccacccgcaaatcatgggtcggttgtacgagccctgcatatcattgttaaacgcctccgcaaagggcaggacgagaaccgctatctgattctcgattggagctactgtcaatactgcatggtgtcaaatgcagtccattcgggactgttcagaagggtgatgcggacctcactgttgatgctcgtctaatttacgatttgtcatttcccccgggcacctcggtcaatgacaacactgttcccgatcatgagattgacgtttgttatgacggtcctgatgcattggccaatcgcattctggatgtggacgaagtcttcccaaaactacagcagataatggctggagacgtgaatggagcgttcaggaacatcccggtgtccgctgacaacgtcgaccggtttgcaggcacgatacccgagcttgggatcctggttatcgacctgtgctgcccattcggctggtcaaactctccagtgtcatactgggtagctggtgctgctatttcgcacctttactcctgctcggcaccggaatggcccttacaacctacatctggaaagaacaacttcgatgccaagacgtggtgtgatgaccacacagcgatcgagcctgatataggctctcggctggcggaagcccaattcgccttgcgaacagctatgatcgccgtattggatcctgatgcaggcaacgagaaaaagttcacgggctggtttaaggaagggcgcgccctcggtctagattggaacctgcactccaacacagtctctatgccccccgagaagatttcaaaagcgtattatcgtgtgcacgacatggcaacacgggcaaaaacgacccggacccagttgcaaaagctctaggaagtctacgacacgttgtcacgtgcgtcagagctgcgacaccattcttccagcgccttgtagtactagcttgagctgctccgaggttcggaagcatggaggtatcgttcgaggcaaaggaagatttgcagtggtttgaaatggtcattcgaatcggtaaattgaacgctgtcccgttgtctagattcacgcgtcgtcaggaaccaaactaccacatccagatggacgccagtgacaagggcctgtgcgctctgctcccgcttcccaagcaatatctccaggttcagttcaccgatgccgagatcgacttaattcgtcagtgcaacgaagagggcgacagcacattctgcattaacgtccgtgaactaatgagcgcagtgtttgcgtcgttagtgtggggctgtacatggaaagaccctacggacaatgaggaagctctcgtaaaattttggatcgacaacacgtccgcagtggcgtggagcaaccacaagacgagccgcaacccgttcgctcaaatgctcctccgtatattgggtatttgtgaagttcagcatgaattctatactacagctgcccacgtcgctggggtggacaaccaaatggcggacgcaggaagcaggatatggcagtcgccggtgcttgcggccgagtttgctaacttatcgtctgattggacacaggtgcagataccagccgccttgcgcgatctctcgcgtctctgggagcgttattgcgagcaggtgccttaacacagtcgtcgagggagcggtattcacgtgggtgggcgcagtggacggcatggtgccctctgatgaactcgagtccatggctatcagcgacggacatcgacaaaaacgctgagcagcttggtgcctacgccgtgtagctctggaagtatggcatgaatcgaaaacacgctagaaacacctactcaactatctgcaccaagctgtgtgctgtgcggtggttccaccgcaactctgcaggttacgatccgggtgtaaacgcaagtcacgctatcctgctgcgaggtatccgccgcttcacggacccagttgttaagcagcagcccttgaccacgcggctgctccgcactctctttcagagcctcgatatatcacagctacgtgatcaacttatctggggtgggctgcttttggggtacttctttagatgctccgagtacctcttcatcggaaagaaggttcacaactacatcttgcgactgtcggcaatccgcttcttcgaccgtgatgaaaacgtcgtctcaccgaagagggcacacgtcgtcggtataacacttcatggcgcaaagataatcagtttgggcgagaggaggtgcggtaccatcacaagtccggggataagctgatctgcccggtacgagcagcacgctgggtgtataaggcggctgctgcgtttggtacatgtccaaatgacccagcagtatcgctgcggcgaggtggtatcacgtcggaggacgtctccaagatcatcaagcacgcagcagcatcaaatggcttcgaaccgaatcgctactcaacacactccgttcgcatcggaggggctacggcattacttaacgctggcgctgatcgcctcatcatcaagctcatggggcgttggctatccaatgcctttgaagactacccggtgttatcggcgaatggcacagtggatctcgctcggcaaatgtgcgagtacccgccatgcagccggtaaggcggcaattcatgtggggtagccgccacgccacgccctcaaggatggcacaatgacaagtccatcatttgacccaaaacgcgcgacagtgttagaaacgctccagcaccccccgatcgccttgcaaccggtacttcctccacctcaggccctagtgacgtacgtcagacatcctggcgcgaaaaaaacacggaatttttgtgtcccgagtaggaacggtcaccaccgttcctactatacggacgaccgttcgaccagcgatcgacttctggaggatcagctgtgggacgatgcggtgagcgggcagtcatccatttcggaggggcgctgactggcgacgcgtcggttaggtggcgcgctcggctacgatggaagcagtgacgcgagcgatgggtgagcagtgccgcgaagggcaggacggaggtcaggagcaccgtgtggctcacgacgtgagctgtgaggtgagccaaggacgaaggggtgaaacgagagccaggtgagccggtgacgtgttgaagtcggcacgtaagccgacagagagccgaaagaagaaggaagcacaagctgtcaggctccgtgcgcggtaaggaagtagggtcagtcgtgaatctgcactggagagaacaagttgattgcttttgcatattagctctgtttctcgctatttgtgccactgcctaaccgttctagcttctatacaacgcttgaccgtcccatccagggcactcgcgacacgtggtggagaagcagggtagggtcttcgttgtgaagtctgaacgacggcagtacgggtcaagttctcgcgtcggtggagcttcgtctggtcttcgggagtctgcctggagtcccagtcttcgcctcggacgggacgcgtgaacggtctggatctggaattgtgtcgtgtgaacggtgcgctcggcaccgctgtgggattggaagaacggtacgcgaagtacccccactggtcatggtcaagaaggtcaagaagtaaacggtcgactcgctcggagccctcaacggtcaaggtcaatgtcaagtcaacggtgaacagaacgctcggttccaccggtaattctggtcggctcgctcggagcctgaagtagtttgaagcctggaagattgaagtttgaagattggagtttgtttcgcgcgttcgagtgaagaagatcgcatgctgaaggtcgagtgaagaagactttctgaagaagatgacggttgttggagagcaaggagagaatggggttcagcggtccgtgcaagatgaagtggcacggttggaagcggaacggttgcgacggctgcaacacggtgggaccacgtcggctctactggggcagcgacgcccgcgatcgtccggagatgcgagcggagtggacgcgacggcgcaggtagccactgctgccggtcgtgactcgcttcgccaggaaacgagggaggctctttgggccgatgaagacgatgatgaacacaagaccgcagatgaacacggtgatgcggtcggagctcaagcagaacaagagctcgagatgaagatggctccgtcgccaggccccgaggctgtgcaaacggtcgaggaagacggtgaggatgccgaatttgatgaaacggaacagtactggtcggcggaggactacggctacagtgaactcgctgagtacgaaccgtcctactacacggactacgtgaaggaagaacttgaagaagtgcagcagcagaggaccccgagtggcttcatcccgatgtacacgggaacggagaagcgtctgcctggaggtcctgtatttggctggagcgtcggtgcccagcaaggaggctacggtggctggggaacggtgccgaagcccacggtgaagatggagcggaagttgaaagtggagcctacagggtagtcccaacctacgaggccggtgaagacccaaccgatgggaccagtgaagacagtcgtgcactacaaagcacctgtcagaactgcggtgagtgcctcaacgaacggacggccgatgcctacccaagctcggaacggtggctaccgtgcccccatgaacaacccgaccgttcggaatgaccgtgatttgtcgtctatggtctccaatcctacctgctttctactcggacacgaccagcatggacaaggcgcgtgacttctgggagctgttcgaagctcacaccagccacctcccggactagtctcggctgttagtgttccgacaactgatcaagggctctgaaggtgaacggtggtggaacaactcgaccatcaagacgttcgcgactctgaaggtccgattccacaacctgttcctcagccgaacggctgaccagctctgggaacggttgcagtccgctcactgtgagcgtggcgaatccgttaaggagtggggtgaccgtgtgacggatctttgtgacccgttggactatccgaacaggaagatgagatatcagctgttccgtcgcggactccgaaacaagcgcatattggcgtgtctcgactcgggaccggcgtgcgatattccggaggcctgcgaatggctattggctaaggagatgtcgcgtcccattgaagaaggcgacgagttctcggacgagaagaagaagtcgagcgggagcgatgcctcgcccgcgaacgacccgatggcagctgtgggcgtgcttgcggagaagatgacgacgatcatgacgcagcagcagcagtggcagcagctgatgatgcagaatcgctggcagcctccgcgctcgccgcggaaccgcatgcccaacgtttcggctacgactcgagtcctggtgctggaatgaacggtcaaggtcctcgtgggaacggtcgaccggtccgaggaatccgtatgggagctgacagtcgaacgcaagagggggcgcctgtgtgtggccggtgtggctacgtgggtcactcgcgagagacctgccgccgccagtccatgacgtgccacaactgtggcattcacggtcatatcgctgtggagtgtgaggcgggacccaccaattaccaacgcggccctgaaacggttggccggaacggtggtggtggcgttaccaagtgcgtgttctgcgaggaagaaggtcaccttatcggtgcgtgtcctggcattgtgggactccgtggtgctgcccgggagctgaggaccaggtctgcacaaaccgcttcgaaccaatgacgggggcgggaggaaggggaggagagagtcactccttcctcttgtctagtaaatggctcgtgtggtggtgatcgcgaccgtgaagctgaaggcagaacggtgaccaccgttgatgtttgtgtgaatgcatcgagggagcagatcgaaccggtgtttgccatgcgtggagcttcatgtgcggaaaagaaaaccaagaaaaagaaagtcgggttcaagatcatgggaacggatgaagaaggagaaggattggttgcggacgttgaaggcaaggaagtcgaagtggtctacgaagatctggtcgctgcgagtcctgaacggtgtgatgaggttgggaacggtgaggagacaacaatcacggggctgtgagaattgcacagtgtcggagccccctaccgtgacgtgtgaaaaacgaagtgccgtggttgaagtgacgccgccggaagaggtgatgacgcccctagaagtgtgggaagacgaagagtacgacgtatcggactgcttgttcgcggcttggacggatgaagagaccgttcctgctgagagcaaggaagtgaacggttcggtcgaggccaggacggtcgaaaccgaaacgattgaggctaaggacacttcgaagtacggccgtttatttacggacgaagaactggatgctatggatgactgtgagcctgggcaggcgagtctgttctcgctggaacggatgtcgccgccgagccggaagagtacgacaaggagcttgaggaccggttgtatccgctggacgaggtcgagttgctgaaacgtgtcaagcagaacgctgaagctcagaccgaaccgtctgcggaagagctggctcgcttcttgggtatctcactggaggtcttggagcggacgcgccaagctgcctccgactcctctggaacgcctgagtactggcaagattggtgcggtgatatgctggagaagccggaggaagccaagggtgcgaaccgagacttccggactccggtggcgaatgtcgtctatggtggacaagctgcgtcaagtggaacggtggggaaggcctcggagcggtctggcgtcggcaacgatatccacagctctgatgtctcctccgaacggtcggattccgaagatgaaacggtcacaagcgtggttaacacggtcgtcgagtctttcgtgttcgagaatgtcttgcgccctcccgatggcccgggaggaacggtctcggtggaggaagggattcctgtcctaagtggagtacatcgcgtcgatccgaagatcaagagagcgatcgcgcgtcaagctgtgttccggttgctgaaagaagcgagagactacggaggtcgaaccaacggttctgaagaagtgctgaacggtaaaggtgggacggtggatgttcccccgttgcgtgacaaggtgcctgaccccgattgggaacggctacgcgagcgcgtcaaccgtgttgtggaacagtatggtctgaagggagattgctggaaacggttgaaaccgtgtatcgagtcgtatttcgaggagaacgcgggttaggtgtggacgaaactgtggggccgtacggggcggtcgaagacgcttggtgctaggcgccgccgtcgccgtcagcctgagaagaagggttgctttgacttttcgacgttgtacaaaccgcatgccgaagtactgggagacgtggagttctaccctgagcgtgaagaggacatttctcattacgttgaggtggtacggtgcgagcgtcctgctcggacaccgttaccacggaccggtctcgtggaagttgtcacggtcaacttgcctaacggatttgggctctgtgatgaaaatggagatgaatgtgacgtgtatcgcgctgtgggggacggacgccaggtggtgtgtgctgttggcaactttgaggctctctcgagcggttatattgactacttaccgtctcaaatgctagcggatacgggcgctactctaagtctcgtagctcgacgcgtgcctaagcgtttaggacggtcgtccgagccgctggaaccgtacgaaggcctggtgaggagctcctcggggcacaagttgcggattcgtggttggattaccctctctctccgtcttggaacggtcgaagtctcgatgagcttgttggtcgctgaccgtctccacgtcgatgcgatcctgggtgttgatgccctaggagcgttcggtgcagtgatcgacgtttcggaacggacgttgactctgaagagtacgggcgaagtgttgacgctgggattcaccatggtgcaggagtcgtacatgacgacgtcggtgcggttcccgccgcgtggccaagctctcgtgatgactcgtgtcgtgggtgccgtcgtcgacaaggcgaccgttctggccgaaggatctttgggtctgcctccgacgctgtgcgtggcacggtcgctgtgcacggtcgaggaaggccaggtcatcgtcgaagtttgcatgcgtctacggatgagtactggatcaggaaaggaacggtcattgcgtgcacttccgtgatcccggagtcggctttcgagccgccaacggtcgatccgaagggtgcggagcgtcaaatggttggtccgaagggaacggtgcccgccgaaggtggcgagcccaaggaggagcgtgcagcgtcagtgtctgaagcgcgcgaagtgggcgtcggcgagaaggtgaaggctacgaagccggacatcccgcccgacaaagcgtaagctatgaaggccgatttctcggtgtctaaactgtcgccggagcagaagtaactgttccgaggagaactgaacggtttccacagcatgtgtgtggactcttccaagaagcccggacggacggatctgttgcaattcgagatcgacactggtgacagcactccgatcaagcagcagccgtaccgtgtctcgttagctgaaggtgaagtcatggaaacggagatccagcagtacttggagctgaacctgattcgactctcaaacggtccgagggcgagccccgtcctgatgattcggaaaccggacggtggaataagattctgcatcgactaccgtaagttgaacgcggtaacggcgaaggactgttaccccatgccgttgattgatgatattctggacgtgttgggcgacgctcaactgttttcgacgattgatatcgcttctggctactggaacgtgccgatgcacccggacagcgtgtctaagaccgctttcacgtgcaaatacggtctgtacgaatgattagtgatgccgtttggcctttgcaatgctgtcccagcgtttgaacggttgatggagaccgttttggtggacctcaagtggcgaatctgtttggtttacctcgatgactgtgtcattttcagtaaggacttccctactcatctggttcgtgtgcgccaagtgttgacacggtaccagcaggctgcgttcaagctcaagatgaagaagtgtcactgggggcgtaggcaagtagcgttcctggggcacattgtgactcctactggaatcctgcctaatccggagaaggtgaagaccgtgatgaacgtgaagcgtccggtggacgtgcatggtatccgctcttttctgggtctgacgagttacttccgtcgctacatcccggggtatgcgtcgatctctgcgcccctggaacggttgaaggtgaaggacgcatcgttcgtgtggaacgaggactatgaagctgcgtttagacagttgaagcgtgcgctcttgaagccgccgatactagtctacccggatggcaagaaacggttgaagttgtacgtggactcgtcacggtacgctgtcggcgcttgcttgatgcaagaggtgaacggtcgcgaccgtgtagtggcctacgctagtaagctgttgactggatcgcagaagaactggatcaaccaccaagatggcatctcggacattgagtgttggggtgttgtctgggcaacgaggaagttccgctgctacctggacaagcgtgagttcgatttgtacacggaccaccaggcgctgacgtgggtgttcagccccggtaaccgtacgacgaacgctatgcttgcacggtgggcgatggagctctctaacctccagttccaagttcatcacaagcctggtgcttctttgggtcatgttgacggtctgccacggttgccgatggacacagtggcggctccgacgatgagcgacctcctgaatcctgagagcacggtcgatgacgtgcttccggcttcagtcggggagcagcctggtacaaacggtgaacttgcgaacggtgaggatgttgctggcgagcgtgcagatggacatgtggatgatgacgaacctgaccgtccgaacgaggacgttggcagcagtccggaaacggacgcgccgattccccctgtggaccggttcggactcgactctgagcagttcgtagaagcgcagcaagaggtgccgtggatcaaggctctcgtggctttcctactggatggtgtcttgcccctcgacccctttctgcgagcgactgttgtcaagatggaacgtcgatatgaagtgcggaacggtttattgatgcggcgtgtgaatctaccagctcgggtcggaccggcacggtccttgaccgttccggtggttccgttaccgtatgtggagaccgtgttgcactactgtcactccgacgttctgtcttctcacttgggattgacgaagacgctggagaaggtgaggagacatgcgttctggccgggatggcgaaaggatgtcacggagtacgtccgggagtgcaaccgttgtggtagtgggaagggctcgagaccgtggcaagcggggcagatgcaacggatgcccgtagccgatctcacgggaccgttctcgctactagtggtcgacgccgttggaccgttaccggagactgaacgaggcaacaagtacattcttgtattcgtggactacttcacgagatgggtcgaagccttcgcagttctccgattggactccgtcacgttcgttgacgttatggtgaacggtgttgtgtcccggcacggtgtgccttcacggttgttgagtgacaacggtaggaatttcacgtcggaaatcgctaaatcgttctaccaaacactcgggatcaggaagctgttcggttctgcctatcacccgcagactcaaggtctcgtggaacggttcaacggaacgctcatgagaatgctcaagatgcacgtgagtgaagcgcaaacgcactgggatctgtttttgcctcgagtgttgtttgcctaccgtacgtcttatcatgaggcgttgggcgatacaccgttcttttctctctacgggcgtgatgctacgctaccgctggacgtcgcgttcctgaacctggggaagaagtggaagaacaacgaagtggctctgtatcgacgggagttataccggtcgctgtgggattctcgtcatctggtcgagcgtcaactggtgaaggctcaagaccgtcatgaaaaaccgttaggtagccgtgtagccgtggagtacgaggtgggagacccggtgtgggcgtatcaactgttccggaagaagcgaggggacgctcggacgaagaagctagcgttcgcgtggcacggtccttaccgagttgtggcgaaagtgggcgataatgcgtaccggattgacatcacgtcgcatcctgacaaggtggtcacggtcaatgtgaacagtttgaagaagtttcgcggcaagtggacacggccgtacatggatgacgtgccggacggtgtcaaaaacggtgaaggggaggctgaagaaggaccgctggaggaggccgacctccccgcgtcgagtttcacggaacgactgaccgttggtaagggggtcacgggtgtcgactcgccgttgttagcagtgtgtgggaaacgaacggtggaccgttccgtggagtacctggtgttggttgcgaattatgaaacgttttgggtgcctcgggccgagttgatgcctgagtatgaggccctagtgacggcttttgaacaagcccggagaaagaagttgcggctgcccgagttgcgtcgaagctcgcggctggccgatgccaatgaagaagtggaggacgatgacctgctaatggcgtagcacggtcaacggtgggagcgtttgtgttttggagagacggtcgtggagtgatgttatgaaccgtcgaactacaagactcaagaacggaacgagtggaaaacggtttgcgtgttgttattgaaattaattggagggacgcacggagtaatacggaaataatgaacggtcaggagcgtccctgattcacggagaactacttggagctcgaagagtcggagctcttcctcttggggttgctcatggccgacgagtcgcccttgtcgtttccagaactgctcttctcgtcgtcttcgggagcgtcgtgggtgtccgagctgcggcctccttcgtcgtcttcggcttggttatcttggtcggcgtcgtcctgctcttggtcgtcgggctcgtctgcctgcgtggggctcggcgtggacggcttctcctcggactcgtcctcttcgagctcctcgggcggagacggcggctgcacggtgagcgtgtcgtcgtcgtcggcgtagtccgagtcgttgtcgccctgctccttgcgctggaacggcttcaagtccatgacgaccctgtacgtgccctccttgagctgcttggcgatcttgacctggagcacgcggatccggctgttcgtcagcagcgtcttccagatgtcactgctcttgttgccgatccaggccgggttgggaggcttgcggcccgcgtcgagcgcgatgcgagccagagcttcgtcactgagtcgaaggtgcgggggacgagtcgggtccaaagcctccgtctgctccagcagctcacggatgctctggtaaccgtcttcgtcgacgcggcacggatccaggatgcgagccatcaggctgtcgtagcgggaacggtcgtggcgccacagcgtgacgaggtccgtcgccgagctggccttgcccttggccaacacggaacgcttggcggccttgcctccgagccacatgaggttgtcgtgaacggtgttctcgaagcggtcgaggaagccgtaccagccgaagaggcagacgttcacactcaccagcacgaggcggccttggttcgcgttgagctggtcgcggcggcgagcgtacagcgcacagtcgaagaacgtgtcacggtggcgcatgtagtagcgccagtgcatcaggtggagctccggaaactcttccgggtcgtaccaggcgcgctgcctggtccaggggtacgctgctcgcggcggggtcttgtcctgcttggcggcggccttgactagcttctcgacgtctcgctgaacgtcgcggtggcaggtgtccggtaagtcgaacaggtactgcggggtgcgcgagctcttgcgctgcttcttggcggcgggggcgttctggtcatcagcgctcaaagcggccggacgcttggtcgcgggtgcaggaacagcttgaacagcgaagcggtcgggcgcgggcaacagcgtgtcgtcggccagcacggccacggccacatcgtcgagggcagtgacgccaagcgactcgccgttgacgaagatggatctgcgcagccgggcgtagaagtcgacttgcgcgcgcagtcgcgcgtcggcctcggctctggcgccgcgcatcatgcggtccaagcgcgagcgcagtcgtcagatgatgacagccttgttctcgtcgcgagacttggccatggtggtggggttcttgggcgtcttgctcttgtctcggcgaaagctgaaatgaggataagaagccaatgagcgtgcgctactgatggacaacgactcgaccgttggaagttgaaggtctgtgatttcctttcggggaagggagagacgcggttgacgagcgacacggtcgtgtctagcatggtgaattgacgaaatgtaacggtgggttgctggatctaccgaagtgccgagtgcgacggctgcagaactcgcctgtaagcaggaacggtggactcatgctgctccaagggctgcattttatctttcgcatggtggcgagatggagacgactattgaagtgatcgagtggtgcttttgaagttcgttggtgctgtggcgcgtcgcgctcacggtgctgtgcagatattggtgggtgaccgttttgttggtcgttggcgcgattggcggagtggtgacgaggccgctgtggagtatcgcgggtcgactgctcggcgcaatcttcgcctttgtctacaagtggtctacgctggtgcgggtgtgcctgaagcgctaccgtcgctttgtgaacggtccggccgtacaaggtcgaccggctgcggaacggagatggaaagcgttcgaagcaatttgggccacgcccatgatcgtgttggaggctcgtggagagcactcggcaggctgctacacaagtggttggaagcgtatcacgcgttgtggtgcgtcttcttgcctgacgtattggagctcagctgcaagtcgacggccaagtactggaaaggatccaaggccgagtgcagacggacggtcgaccgtgcgagctgtgtgtgtcgaggattctgggcggtcgtgtcgttgctggcttatgccctcttctacaccgtcgtgttcgtgtacgacttcgtggagcaagtgtgccaaggaacggtgggggtcgcagtgctcctgctgacgctgaactacatattggctgatggaggtctggtcgtcggcgacggactcgtgcccgacgagacggtaatgcggtgtagttgctatgtggtggcgacctgcgtggccagccacttgctgaaatggtatgaggcgacttcgggtgggcgttcgcccttgaagatggccgaggaccgctactcgcaatggcagcaggacttggaagagctggagcaagctgagcgcttgagcgaagcgttctggcgtgcggacggctgcgtaggcgataagaaacccgtgaggacgctcagtgggttgcgcgctgaacagcgagaactgcgggccaaaatgcaaaccgacaagctggaagctgctcgacgaggacgtcgagtttcagtcggggaggatgtcccgagtaggaacggtcaccaccgttcctactacatggacgaccgttcgaccagcgatcgacttctggaggatcagctgtgggacgatgcggtgagtgggcagtcatccatttcggaggggcgctgactggcgatgcgtcggttaggtggcgcgctcattcgcgaatttcctcgccgtagttaacccgccacgccacgccctcaaggatggcacaatgacaagtccatcatttgacccaaaacgcgcgacagtgttagaaacgctccagcaccccccgatcgccttgcaaccggtacttcctccacctcaggccctagtgacgtacgtcagacatcctggcgcgaaaaaaacacggaatttttggttcggttagtaataaggcttgcatcaaattcggaacatcttcttttactcaagctcgagtctttttcggtagaatcacaccatttggttggccgcaggattgttatagcatatccgtctgctctcacaaagccgtcttgcaattgcgcacctcagcactgttcaagagtagtggtctggtttctatcagcaaccttgcaccagtctgagatgtctcctctatctaacctagaggttagatgactaatgcacgtccgtgtctctcattttgagggacctcgatgagcgggtattccttacgtattatagggattacttccctgccctgctcaaatggtgcaggaacagaccttgtgagcaaccgcgggggctgtgctgttcgtgtcccgctgaacacggctgcttggtggcgtattcatgtttcatcccactgcgctcaaagatctggttgattacttttgctttctgcttggaagcgctgcatgacacgtcaacacgctatgggcacgagcactgcgagcaaaacagaccagaagcagcataaggacacgggactctccaggccaataatgcattggaaatattttagcgcgtgggtagcaacgcccagtcccatctcgacaccgctacatcgatagtggcggcagggcaacagggtagattctgcctaaacatccctgcccacatatctcggcgctcttccagagagctgacaagtttcccatttcttctttcccactacagtagaccaaacatcaagcagcttggagttctcgtgaagatgcactggttcaagtcgctagtcgtgttgcccatgcttgcctgggtgactctgctctctatgggagctcgagctgaatccaacattggcatcggcaagagcgacatcaccgggcctgctgcggaggtcctcatgatggggttctcggatctcaaggagagcactgcaggaattcttaaccggctgtacgccagagcctacttcatcgaagaccccgtcaccagcagccgcgtcatgttcgttcactgcaacctgcactctgtcatgcagctggtgcaccaagaagttctcgctcaactcgccaccaagtataacggcgtctacaccgagcagaacgtcgttctacacgccacgcacacgcacgctggaccgggaggcactgccggctacttcctctacgacgtgtccatcctcgggtacatcagcgagaacttcgacaagatcgtgggcggcatcttggacgccatcgaccaggcgcacaactcggtggcgagcggcacgatccgcaacacaacgattgagtcggctgagatcattggcaggcgagagtatgacgctttgtcagcgctgatcaatagcacctccgagttgattcaaggaagtgcggtcgccaagctctcgtacgtggacatgagcaatgtgacgctcgatggtgtccaggccactgacgaggatccgtacgcagaccgaacgtgtcctggaatcgtcggacagaacttcgctgctggcacggaagatggacgcggcctcggctggtttagcgagggggatctcaagaccaatcagttctttaaagcgcttggagctgctctaagcacgaagacgccgcagtgggtgcaggactgtcagaacagcgtcaaagtgccgcttgactcacgaagcctgttccgtggacgcccaacatccttcccgttcagatcgtcaagattagccaattcgcgatcgctgtcacttcgtttgaggtcacgaccatggctggacggcgcatccgtagcactgtgaacggggcgttggcagacgctggagtcacggaggtcgagctggcgactatcagcaacgcgtacgtgcagtacatgaccacgaaagaggaatacctcgtccaggactacgaaggcgcgtcaacgcttttcggtcgcaaccagctcgctgccgtacagcaagagctgtctcgagtcgcagcgtcgatcgtggatacttcgattgagctcgatgtgggcccgaccccactgaaaatcgatcgtgactccctcgtaaccttccaaactggtgtagttgtcgacacggcgccttcaggtggcttcagcgctgttcgtacacagcccgagagctcgtatgccatcggtgacatggcctcctgtgtctttgcgggcgctcacccgaagaatgcgctcactctggtcacatcgttctgcgacgtcgagcagctcgagtccgatggaagttcgtaccgcaccgtcatgaccgatgctcactgggatgttcgctaccactgggaacgctacggcgtcgctggaagcaagaacacttgcgagtggaacatacgagctggaggccaaacgagtgtggctggcacgtatcgcttcgttcaccgcgggtacgcaaagagtctgactggcaccctgacagtgtatgagagtacttcgggcacctttacggtgacagcgtaacagcttacagaatatgtcactttgactttcttgctggattccgtccttccctcgatactacagtcttcgtgtagcgccgcagcatcgcatgggaggcacgcagaatctgggaaccattggaccagcgggacttcgcctgcgtttctgacgcccactcgtagaaaaactcaacgcgacccgtaagaagcaaccgctctccttcgtcgtcgttgctggctttacttgaggcagttatgctcaagcgacggtggcgttggcagcgcagtgaagctgtcaagaaccaaatgagcttgcagtcccaaagataaattgtccacagtcgcgataccaaagcagacaaagtgctcagttgaatacgccgtcctctgatcactcgatcggttactgtgcggtttggaacaatccactcgtcgaaaacaaagagttctatagagagaatgataagccccgtgagctcaaacgcgagcacggagagcatgagcgtggatctacggaaggccagcagacgcatggcacttggaggcagagcgtctagtgggatagcccattgcatccaaatccacgccccccccagacccaaactactcgtcgatcccaagcgaaaaattggcacaatgccaatgagaccactgtgagcttcgtcgacagaaaatgaagttgcaagacgagtacagtcgcttgagtagcgtgaaatagatctagaaaaatgcgtcggccctggcgcgagccggatgaccacaagatccggtccagtaggcgtccaaagcccggtacaattgtcttgtgggagttgaaatccacgtcaataggaacgaaatgcaactggattttagccagatttcgggtgtgaggtcgtcttgcattgtgaagagcatatcctccctttgccgcattatatcgcaccaagttcagacgactgcgataactgcccagagcctggatactgatcacgctagctccatcatttgtgccgacagcgcttgctctggaggtgaagctagaactcctagctcgcaccatattttcatcaagagttgaaggaatgtcgctacttttcgggcgtaacccaacagtgcaatagtagctgacacagcgacgccgccctgggatatagctcgtctcggagttaatacgccgggatgtggcaacctcttgctctcgcattgcgacccaccagccgcccaaagagtagaatgatgttgagctgagtgttcatgagcgtgtcacggattgaaaatccgttgccggtggatgaataggagagaaggaaggagtctccgttgccgttgtcgtccacaatcttcagggataccgcgacgaacattgcaatatgcgttccgcagttgatggcgctggaaataaaaagctggcgtctatcaccgacgagtgcatcagcaccaatgctgacctgcacgatcacgcagcctacgaacgcagtcacaacgcggagatcccgaaagattgctgtgaagcacacccgaagatgaggttattcagcgtaaaataccataagtcgtacgtgctgaagagtaaacgcagcatatcgatgcgtatcgacgccgcgataaatgacattcgaggaagctgcagcagagacggtaaacccgcaaccacagatcccagtcgtcgtggtgcggcgaccgtcaatagcatgagcaaatttcccagctgcaacatggctgcgatctgcgacttctagcgggttttgaacctgttcaagtgtcgaatctgctcgggacttaacagaagacttttgggcgtctttgatgcgtcaaattcaggcaatttctcaagtggaaccagctcgaatacgggcgatgctctggatggcagcgaatttcgccacgcttggcgagcatttgcaagtcgaactgtctgctgactgggatatgatcgttgcaggccgggccgctgacttccgaccactagacttcatgtgaatttctcttctcgattttgttaccaccacgccgcgaaaccttgtactaagcgggggttaaatgttgcgctgtcaggttcatcgaggaagctgaccgtcagaggctcaacgtgtcgagttgttgctatccatacagcattgagttctgagacgggagacaagaataacctccaccaatttgtcatggtatttttcgcctccattgaagctctcaaaatattatcacgatcagtcctgggacaacgcaaagcgcgaaaaacttaaaatatatggccccgaaagaatacccagatattaaacgtttgttcaaggcaaggagggatgaacgccaccgtgcgcccatggtccacgtacatgggactttcgcgactacccgcctgaccccagttttcaagagaatacacatatgcttcagtcggctcaaatgatatgcgagtcgaataaccaggcagccgaaacgtacactgatcaacagggcccgagccaacctcatctatattagcctgagccgtgtcacaaatgtagccgatgacacgctcatgactagagagtttaagctccctcctgatatgatcaggcgtcgttggctcttcttggtaggttgcgacatcgttactcgcaccacggaagacaagtagggaaacgtcttccttcgtcgccgcggccaagggaaacaatttcctccatatacaagtcttggcacctttttaacttcatcactagcttccacatagtaagtaagcttacgaccacaataatcacccttcgtaacgagttgtatcaatccagtaaaggaggagtatccatggggtaggaaaatgctatttccgggagcatgaggattcgaggacgactacacatgcgacgatgaagagcaactctatatttacataagcgatcggtggtgtagttagacgatggagcaggcctcattccggttttctctccactctgctgacgttgactcaccaagatctaccgctattctgcccgacgatgacatctcctgcccctggggacctcgcatttgttggtccaaaccatattgaggagttgtcggacttccaatacgtcgagctggtcgaaatcaacgatgccacagctacagtcaaattggctgtccccacggaggatgaaaacccaagccaactgactctaccactagaaacgttcaagcttcgcgcggtcccagcatgtgaacgcagtatgtggccgggctcgttcgttgcccacccgatagcgtttgcctgcacttccagcgacggtgtggacgaatggacgtacggtgtcgtttcaggctacacctcctcagagcaggcgactacgctacacgtggtgtgccaagacggctccgttcgcctcccgctatcgtccacagtaagtgtgatcaaggctgacgtgctcaattacgcgctccaaactggtgctcgggtcacgtcactccgtcggagctgctgaaacagcttgacaaggttgtcatggcgtgccgacgacgacgttggggaatacctaaagctatccgagagacaatgtccgtaccctacgttggtaatgaggttgtccccctgattcggcccgctgacctccagctggtacgcattcgacatcaacatgctgtcgattttaccatggctgcccgcttaaaacgccctgtcgacctgtactccgacacacagatcaagccggggggatccaaagtaccccgccccaccgagcggtcaacctcatccggacaagtctctactgtaggaaagcgagctcgcgtacatgaactggacgaagattccgacatcgacctctctgactaagattccgcgaagatctccaagatgtccagcagatccatcgtcccctcaccaaacgtaggcgtgctgaacggcccgccccctcccaggcctattcttcaagtagcagtgaccacgtcgatgacgcggtatatcaagacacccggcgtcgaggagtggttttccacccctctccaacggacaggcaagttcacaacgcgatcgtacggcgaagacacgcagttaaggaaccccaaatgctcctccaatatgcccagcagttccagcgactcgacttcatcggaacccctcctgtactcggtagtacctaccattttggttttggactcgggctgtccatcatgcatttgcgtagagcccgtactgcggacgaggttgctacgacggaaaatggcgtcaacatgtgggacttctcgtctaagaacagtctaccgcccccggctcgcgctaccagcttcggtgatctcattggcgctctatctgctttttacaagttcgcgaaatacttctacaacagcgacaccagacggtttatcgctgcagcacgggacttcgtgatttcctacgctgatcacgcccacccagaccaggctcgcactgggtcaactgcaagttcggtcaatttcgcagtcgcgtcgtcacaaaaggcctcggctctgccttacgggtgcggaagcagttcaacaggaacgatgagcaactactcgcgttgaaggaatcagacccagcttggaagcagttgtcttcgcgtcctataacgtcagggcgccccgacagcgcgccttctaatcgttcgacaagacagcagcccgtcaaaacgaagattccggccgatgttatctcgtcacttccgaaagcagcggatggtcgccgcctatgcatgcggtatgcatccaaggtgggttgtacagtggcggactgtgcccgtgcccactttcgacctgacgcgttgacggacgaaacaaaagcggtcatcgttcagcgctggaaaggattgtcggatgagtgcaaagacttatgaagccaggagccgcagcctcccgtggtcacggggcaaacagagcagtacaagcaagaagagcaacgtcggtacgactctttcatgaccaccctcacgaagatgcggcgtgccaatactgagagtgtcaatcaacactgggaggcagcagcggcaccgtaccaactaaaccccccagcgaccgacacagttcaagtggcagacatcgactatcacgaggtacaattctggaccacactggtggaaaaggcctcgctctctctacccagtgctgtaaagcttttccgcggccaaacccccgatgatcctcgcccaaacaaggatttgtacgagttgaaggtggcggcgcatcctgacatgactgagtcgaccatcaattggaacaaaatcgtgcagcatggagttgttccgcagtggctaccagtgaaaccagaacgacagacagcgcgacctccgaaccacaatagtatcaagggacacggcgccagcattcgtcgccacctgcgcaaaggacaactagaagggcgttatttgattgtggatgcccgtctccatgacctgtggccggagttatttatcggaccccttgctgtcgtggacaagccaggtgctacgaagccagacattcgtctcatcaacgattactcctttccggccggggcatcggtgaacgattacacggacaggagtgaccatcctcctatctcgtacaatccaccgcgtgcgatcgcccgtcgaattcatgagctcaagcaattacatccagctgcatacgtactgttgatgctgggggatgtggctggagcatttcgccacattcctattaacgcagaatcggtacacatgttcagctttcgctatgaggatatcctcgtagttgatctctcctggggctcctgtggcttcgggtggtgtggttcccccgcgttttacacagttgcaggcagactgatcaatcacctatacgatttcggatatcgcctggatcgttcgttcaccggcaatgtatggtgcgatgaccatacgtgcgttgaaattgacgaaggcacaaggtgcttcgacgcaaatatcgcactacgacgagcaatggcaacggtactgggtcctacagcattgaacgaagacaaattcacttcttgggctaccaaaggcaaagcgctgggattgatgtgggacactgaggctggctccgtgtcgatgccggctgacaagattaataaggcgctggacaaagtgacacagctgatgaccgcaccaaaagtgactaaatcggccctgttaaaagtgttgggaagtctccggcacgttgcaacctggctagagcattctttcagcgtcttcaagccgaagtgaacgaagaccaaccaattaaacgctaatgtggcgcacacaactcctaaacatgctctgtgtgatagtttgacacactgtgtaatacttacagatcgaatgtgattttcgtattccatcccagtgaatgtgttggccgttccgattacttgcgcgggcacaggcttggcgccatcctttgaaaacttagatggtgcgtacgggtttgctggatatgccttgtccagaaagaatcgcagcttctgctcgacggtgatagtcacgccatcatgagcttcattacggacgacgttgtggatgttgtgccgagtgcggcaaggggcaacagacttgccctgtatttatagagcccgatggatgtcgccttcgcgggcatgctctactttttatttgaatttagcttacctccaatttatttttggacagtgctaccgtccacgtttcgacaacctgaacggggttcgcgactaagttgtaggtcgcctggtgtactgggccccatctacataagtaggtagattgatagtgcataaagtagttaagtcactacatcactagcgtatactgacggtcatcgtgattagctgaattgggggagccagtcccatttcagccaatcaggcgttgaccttcatttgggtagctcacatgagaccaggggtagagttgattttaccgcgacgaactacttcttccgcgcatcggcctgtcggtgctccctgcgagcgttcgctagtccccgcgatatggaggtcaagcatgcggatggtaaggcccatcgcctcgcgcgacgcaaggtatccttgccgtacaagttcgacggcttccgcagcaacgacgacttccgggcgattgaggtgaattacgcgcttgactgtattctggagatcccgtggcttgcacagtatcagccagatataggctggctgccttgttcagtcaaccgtcgacgtggcttcgacgtacgcgaagtagtgttcatgcatttcttcgtggtcccaagcgaccggcatcacgttaccgtcgtggaaaagacagccacgacgcaagttgtgcactgagcgagtgatggtcctctgggccgtgctgtaaatgatgactagccgagcgcagccgctacgcggcggtagttttagttttggtccctgttgggtggcttccccgcctccgcttcgatccaagtgaccgaagcttcaggtcccaaacgcgtgcaacagtaaccggacgatcttgcgctgtttgaccttttggaagccgacaaacaatctcttgccactcggggttgcaagtctttaccagataaaaggtccagcttaccgaattctcgaacgttagccacgaaatctcaatacgaccggtacatatgacagggaccgccactaaatgttgcgggaaggatgattttctgaccaaagcggttcaaagcggctccagtgtttgagttctgcgattgactcagaataggttgcgtctacgtcgcccaaggctgtctgctcctcattcagataagcgtccttgacacccgtgtacagatcggcccggagcgtttttcgaaatcctccgtaacgtttcttgctccacctttgcctgctgggcgacaccctattgccgaaaaagacgccctccttggtgcaatacagaacctttcccttttagggaacaatcggtaagcaacgtgttcccgtcgagacatctgtgtgttacggcgatattctttaccatcggcgtactggttcgtgtatgtctacccaagttctccccgcggaaacaacagtgagtactgaagcggatcatacatcgggttcgtttcgaaaatgcgaaggaggctgttccgcgccgtgtgcaacacggtgtccatctccttgttaacgcttctgtcgtcaacgatgacagctccaacctcgttcacgttgggcaagttggtagtccgcgacctgcgattgtcggcatggagctcatacatcaggtctaggacactctttcctttctcaatgttctgccggagccggtctgcgtgtgatagaaactgttggccgaatgggttgtaagctctcatcattcgctcgagtgtcgtaagcttttttacgtccagttcatgaaaaatcccctttcgcagctccgctctctttttcaggtcgtcatccacgatgtaaatctgcgcaaactttgctggggtgaagtccacaccattgtgatccatgcgtggaagcagtgaccccaagtattgacacatgacgccttggactcgatacgtgtacactctgcgttgagcttggcccgaattgtccccccgtacacctcgaacgcgaacaccatcgctgcgcgccattccagttgaagtgaaagcaaaaacctggttgtaggctcgtttcaacccctaaattcctgttctttgtagtgatccagtagatagtatggaaggcgcagtcacggagcgagttgcactctaccctcaagacagctggatacctcggacttgccaggccacttccaagccccaccaaatccacactcatacatcacggggggcatgtggtgcccgttggatatgctcttgcccgataccctggacatgttaaagttctcgtggttggaaagcgcatgacctcgaccgacacatttgcgacgtatccgagcagcgtcatttcttgcttcatcctcctgggctcggcgtcgggcgcggtattgctcatttacctccccacgttgttcgggtgttagctctgcacctagttctcgatgccgctccgtatttcgttcgcgttccgcatcatgctcttcttgcgaaacccttgctcgcgccgatcactgttggctggcgttccgttcgcgcccggcatttcgggcctactgggatagccccgcacgacctgcgcgctgctgttccgcgttataatcccgcacattctgtgtatttgaattgccgaacataggatcttcgaggcggtcttcacccttctctagagcggtcaattctttgttcaacctcctcttgtggctactaattcgaccgtgtctctgcttcttagctggcggctcttctggttcactgggagggggaggggggcatttgcaagctagtagtccctccacgcttgctcattctccgcgcgagtcctcttccgcttagttcgagaaatatctacgaacacgtaaacgcaacgcgttagatataaagcctaagtacactgcacgcaccagcaaacgttctattgccgagtaggatgtgggcgttatttctcaccggatgcgcttggtgcgcttggtcccttcgaggtttactgtctcttaacgaagtagccgtacccgcagtcacaggcctgaaggcccggagcggtgtcatttttaaagccggtaggtccgggttgcgataccgggtagtactgagtggccttgtgcgatataatttgccccgcacacgttaatcgaccctgattggtttaactagctcggctcaactggcgggtactgatttagtgacatgtgtggtcaatagacaggcgctatttgtactctcgctcagagggagcccgaggtcggcaacgccgacgctagctgctcttgcgtgcgtgctcgcgcgcgcccagggcgctccgggacagcggcattaggcgctgtcacgagtggggagtcgcgcgcacctgtcggtgcgtgcgtagcggcaacagggccatcgctcactgttccgctgttgcaaccgaagcgcacgagagtgcgcttctatcaatcgatgaccggatcatgccgtgcaagccacggcatgcccaatacaatgtcaaacttatcgtccagatccaggacgataaaggtctcgacaaacccttgatcttcatacgtgaagcgctcgtgtaccatgcgcttctcggtcttcacgacggcacccgttgccagtcgtacctccaacatactttgagttatctttaaatcctcgaagtcaagccttgatagacttcgcagtcgaacaaagttcttcgacgcgccagaaactaccaaagcacggagagagccgcttgctctcatcgagttcacgttcaggatgacaaggtcaggcttgtcatcttggttcttgcagtgagaatgaatctcactggggactgcagtcctcagtgtcgcgtgtcgaaggtcgacacgcggaactgcattaccagtagggcgcaccgcgcctactcgcgtccagcgttttttgtttggttgcgacggtgcccggcaccgccgcgatagccaccctgctggtgcacgggggccgtgcactccagagcaaactgaccgactctaccgcaacggtagcatcgcacattgtttccctgcgactgctgggaccagcggttgcagcactcgagaggtccatggcctcccgtcctcactaccgggcgtggctgtggcctcggcacatgtgcatgcagcttagcctgccgcaggctaaactcctcctgcattgcaagagtaattgcagcttcgagagtactcgggtactcacggaagagataggtcttcacaggtccatctctcagtcccttcatgaacgtgacgaccttggtcgcctcgcgatcggattggtcacgaggttcgagaccaagtaacgtgctctcggagcgtaagcatgaacatcatacttgccctgctgcaggtcgaggaactccgccctcgaccggaactcgttttgcggtggctcaaacgctcgtctgagctcatccttgaaatcctcgtacgtgctaaagcacgtaggatccgagagtcggcgcccatacgcccaacttcttgcacgtccgccaagacatgacatggcgaacgcaaccttcgagaacgggtcgacgatacgtcgagccgcaatggcagtgtcgagttcgacaagccaacggaggagaggttcaccctctcttccgacatagttactcacattgagcttcggcgatagcgcgcgtggtgtcgtcccggacggcaccgcggtagtagcagcaacctcccgttgctccttcaggatgaaacccagagcaacaccgtgttgctctgtcggcgttagcgtacgcagcatcgtagctacagccgcctcaccaatgactgttgacagtcgttggagggcctcccactctggatccgacaggtggggacagtcagcgcgtgcaacgtgagttgcaggcgtagtggagctttccatatccaagggaaggttctcagctccgcgttcgtgtggtgacgtacgaactcaggtagtcggtcgttggacggactacaaagtgctaccaggtgtaatggacctactttggcgtactactttaacttatacgtgtgtgcacgtgtgtggggaaccgtaccttagtttaaactagttaattatactcgggcctccaagtatagattaatctaaataaacgatccaaatactatttgggttaaaatgctgctatttttgttttatgctttctcacttcctctaaatgtaatattctaagttaggaatctgccaacggctggttggcagaattccaacgctaggaatgtcgcccattggctaaaagatgcttttttcagccaataggaatcgtaagtctctatggaccacccgtcgtggtgatcgtaaatgcatgtagtctttggtgtgtctacaccaaggtcgagaaagtctttcgaacctctaacagacgtcgtgcctgttagaggtacaagtgactgtagccacttgtgcgtgtaatcctgttacagcgcttgtctcgcaaagggtaaaccacggctcgatcacatgttcaggagtcccgtgtagccagcgcgggccgttacgtgcattggtccgacgtagtccacagcgagtaggagctggttcttctttaactcgcggggcttcttgggagcaaatggcttctgggtcagctttacgctcgagcgcacgcttgctcgatgacgcctctgcagggtagcttcagatccgcaaagacctgttgcacgcaatgcgtgttgtggtggccgaggcggccataccatgtctccacgcgtggcgccttggccgtcatcatagcggcgccatcgattggcccactcagatcagaatccacatacatgtggtggttggcgcgtgaggctttcaaagccacatcagacctcgcgcgtatcacacaggacacgcccttgaacgaaatctccatgcccttgtgcgacgcagccgcaaccgagacgagattgcgagcgagcccatgcacatacagaatgtcctgcagtacacaaacctcacgaccattgcacagcagcggagccttcccgacagcggtagccagcatcgtctcaccggatgcaacggtcagcaagcgcggcgtgtccagtgtgtgcacatcgacgaggttatcaatgtggccagtcatgtggcttgtcgcaccactggcgggaatccattcccgcttgtctttggccgtcgtgtcctccactgaaaatgccatactggtcgattccttcttcatggttgacggcgccggatcaccggtgcagttccaagcgtagtgtcccatttggtcgcaactgaaacacttgacctttgacaggtcacgtttcttcttcgacttggcgttgctcttgccggccttttgctcagcgttgaacgcagcagccgtcctaccgctgcttgtagcaccactcgtcgatcgacgaccttctactgatcaccacattgcctctgcttggcatcgttggagcatgaccttgaatgtcgcgcatggctcgaggacgcccacgaagccgttctaagcaggccccaggctctgcatgaagttcggtctctgctcttcatcagagacagtcgtgtgctgctcgtgcagctcatcaaggacacgtcttgtcgtcttgatgtgcttcaccatggagtcatctccatccagatagagccccatgtattcgtgcttggccgccccaatgcttgcgctacacttgacattgtaggtcatgcgtaggcggcggatcatcgtaagcgggtgttctatcaggtacacttccgcagcgagcttctcgcccagcgccgccaagatgatcgaagcagccatcttctgttttatcactcggtcgttgagcggcgtggccggcatcgaagctggcgataacgttccagcaggagctgccgccgatgcagcagcgtccctctcggccttcagctcggcgtcgttcggcgtcggtgcattgatggcgacccaaagccccttgatctccagcaccagcttgacttgagctccccaggccggtaagccagttccgttgaattctctgagcttggttgcgagcgtcgaggccgtagtcgtagacaccataacctatcggaagggcttggatgcagagaaattcgcggtggcgacggataggaagataggaaaggagacttgggaagtccagcgaaagatgaaaagtgattgaagtggggccaaagctaaaaaccaaacaaactacagcctgctatctgctccatgggctgctgctgctcttcgaagaacccgacgcacgagaagttaaaatgcagccatagcacttgatgcgcgcccggtggcgccccacgattgactgccgcgtcgatgacggcttgaactttgagtgattgctagagacgatttcgaaatccccccaaataataataaaaaataaatataataataaatataaaaggcaaaaagaatctcccccctaaatacgctcggagcattcttgccaaaaacacgaaaacgtccttcaacagtatgctggagggccctcacacctgggtggtcgcccaacgatctggggacgtggtctacgctactaatctagtgtaccacgcggtgttgtttggttacaaagagggtacggaggataattataagtggggaatgatcggcggaaacgtcgtattgacaactgaagatcatggagcagcattacggtacgtgtcgggatcgacaataggggtttccaagggcttgagtggcgtggttgagcgttctctcggcttttacgcatatggagggacgcgagtggagtgaaaagaattgcgaggaagagaagcagcggcttcttcgacggagaaacgaggactctctctttgttgtgcatagcgctggtgcacacactcggtgctcaaagaagaggaagcgagctggaatattagtcgtcgccagggctgctaagaagagtacagatactcgaaacgttattaataccatagcggcatcttggttaaatacgttgtgagtataagattacgtatagttgaaatatgttgcacttttcatcagtgatggccaaaaatgtattgcaggtattggcattcaccaatacttattgcaatgccatactgcaagcttgcaagctattgcaatacatattgcagagcgctgcggaattgcaattctttctgcagtcttaagacaaccgaataaactcttcaaacccttgtacttttcacgtagaagcaggcaaggctgtcaatgtcaagataataatgttctcaaaaccaagttccgacggcatatgtgctatcggtgacctctacgacgacagagtagtatggttatagtattgcagtaattattgcaagaacgaccagtattgcagttattattgctggctgccttggtactgcaattcatattgctacagatcgctttacctccaatgccttcccgtacatttttggccatcactgcttttcatgttgaagttatggtaagatacaataaagcatttggatgtgcaggtagttgttcgctacagtaggaccgttaaaattgacttacactgtagaacaaacctatactgcttcgtattggtgaaatcacgaatgtagcatagggtacctactaatttcgctttaataaacattggggccccagctagctctcaaattcgccaatgatgatatattataaactatacatgcaccctacgtgaactttcaaactaaacgcatgctagttttacattacgtataggtatttagatctcaattacgattgataaaacataacagaaaacagcaccaacagtaaatgtggctttttaaccaaaacataactctatgttacattttgtatatcaagtagtacccctggtgcatgacgaggtggctcagctatcggtggcacttcattgtggtggttacgaccagcgtattgtatagattggatccggtgtttacatgagtgactgtcttacagtctgattatcgtcaatttctaacctttggttgagattaatagccagtgattgactatacaaatcgcgataggtgatgtacagagtttcaaactcgtatacttatagaatattctcatggcgtcatcatcaagtaatatcatcttacaacaattctggtttgagctgtggtacaaacttaaagtcgttcttttcaataagtctcgatttaagtaatcttgacaagaatagtgtttctgacgtaacctgcgtatccgagtggccgaactaagtgttaccaagccgagccaggcgccagatagaatcgacactatcgtagacacgttaaggcgcaaactgaaaatgtagaagtacaactacagcaatggagaaccacctcaatatcaacaagttggatcggcggtactataacatgcattgtacctctactacagcgtgcttgtcacggaccagagttccgatgcacaacgaaatgcaaccaggggtgcaaaaccaaaaggtaactatatattcttaaactggggaccttatgtaggaagttaatccaacgataacgcgggtccatctgtggcgggtcttccaccagcgcgctttctcctgttgagaaacgatcgcttggcttcggcatcttagggacatgaatgccagctcgccgcaaacatgtgactgaatgcatacaagctccatacttattccacatcggcaagggcaaacgcttgtttccaggttgaacttccagccgtcaatcgactaatcttcgatctccatcagattcttgttttccaacaccgttcacaacttcttccaggtagcgctttcgttgaccgtaagtgtagggtcttcccactgacacaaatgcatgatatcgtccgaagaattgccttccatgagcaacataatgctgatgtgttgcggctgaacggtccacacactcagttgtgtttcgctagacatttggcgcgatccagcattcttcgattcgggacagcttgtaggccaatttcctttgagcatactaaaacacgtttggtggtcagcaatcgttctggattattgaaggcgagccccatcaagctcacggagtgagtgtgagttggggctgcccccttaggagtggttgtggtgggtgtcgaagagtcgggtgcgtgccgccgggcgtgcggtcaagcgtgccgtggtggcgtgtcggggctgctggtgccctgcgcccgacggtgcaaactcttgactggcccagaacgaactgctcaaactacactactgccacgttcagctggggacaaaggcccggtccaagaaaaccgcccgcttgaatggcatactaaacctactggtgaccgcacgcggcttggtgtgcgtgtgcatcttggtgtccacgtccgccttggtgcccgcgtgtggctcgccgtccacggtcacctcgtccttcttcaacgtggctttatccttccatcggaaaacataatttcctcgctacactcggaaatacaccaagggctttcgtcacgcgaccagtgacgacacatcaacttgagccgaatcataagtccgaccagccttatcacgttaaaaaaacgtgctttattgacctgttcaaagtctcaacttggttgttggtcgttgcacagccaggttgggtccaaaacacgccccaatactgaatccaacagtgactggattcagtattggggcgtgttttggatggttgaaatatgtagcaaacttagcgtcgtcaccccaaacactcaaagtcttctttaaaaacctttcacatggacgcgcatgagcatccgccaacgcttttgtatgcaggacgcggagctcaatggtgtgctgctcaagctgtcgcgttttcacgaccggaggtcatcaatactgccggcctcctcggtcgcaggaccccgccgggatgctccggatgctgcagcttcccgtgagacacgggtcacggacaaggcaaacccgaggcgctcggtaccctcggcggtggccctcgccgctccgcgtgagaacggggacggcaagcaactgtgtcttcgctatatttctgcccaaggatgtccatcacccaatcctgaccggtgtacccatcacgttctgggacacttcgtgccgtcgaccttggcccccgtcgtgaaggcctatatcgtggagaaatatggtggcctgcgcgttgacatcgagcaaaacctgtgacggcctcgacgcgccggccatccggtcatggcagtctcactcgctgtcgtgaagcgggtggcggcgcgtctagaagcgatgctggtggtggacgaagcgtctgtagcagcacggcgactggccgcttttcgcgacgctggcgtcccgcttcctcggccatcccctactcacgtggacacaccagtaggtaccagatacctgatcgatgctgaaatgcaaaaggctttatctacattcgtgcgtcgttcgtgcctgtcattcgaagagactgtacgcttatggcgaggacaacatgccgctgatgccagacccaacaaagcgttgcgcgggcaccacctcgcgtggctcccccacggctacgacaagcaagctctcctactcaaggtcattgccgacggcgtctgtcataacttccgtgaaggttcaaccataccacgtcagctatcgcgaaaccacaagtcggcgaacacgctcgagaacgcgctctgtcggagtattcgcgaaggccaagacgcagggacctatttggtcgtggatattgatgtggccgagcgctggagcgtactgtcttacagcccgttcggatgcgtcccaaaggcggacacggacccagctctcgaggcaagagtcatccacgacctgtcatttccagtcagcgcatcggtgaacgatcggtctgatccggacgagctaccgcagctaatttacgagcatatcggcgcgattgcacggcggatcgagatctcaagcagcgctctccgtctacgccagtcaagctaatgcgcggcgacgtcaaatgggctttcaaacacgtccggggacatccttcggtgtgtgccaagtttgctggactacttcccacactgaaggcggcagtcatcgatctcgcgcttccgttcggctgaactggctccccagctatctacggcgtctttggctcagcgatctcattcccggtgcgccgtgaatgcccctccagcctccaccctggtgacttagacctggaccaatttttttgcttcgagtgggttgacgaccacgtcttgattgaggaagaccgcgggcgtcgtttggagttatgtgaatgtgcacttcggttagccatgctggctgttctcggcccccggtctattaaccataagaagttcacgacgtgggcctcgcgggcgcgtgccctggggctctactgggacacggagcgccggacagtgtctatccctgaggacaagatcgagaaggctctccagcgcatccgcacgatgcgacagaagtcctcggtgtcgcgcacggagctctcgcagctcctcgggtcactacggcacgtttgctcgtgcattcggccggcgaagccgttcttccagcgcttggcttcactcccccgaagggctccgcgcgttggcaaaattcggctcgagttggacgctcacctcgacctggattggttcggccacatcttacagcatggccggttgcgtggtatgccgttgcgatttttctcgcaacccccagtcgcggacgtgaacattctgatggatgctagtgacagcggtgtatgcgcccttcacccagcccagaagcagttcatccaggtccagttcgacgctaccgaacggttgatgattcaagagggccgttttccgatcaacgtgcgggagcagctcagtgcagtttgggccgtgttgtgctggggacacgattggtgtccccgatcggcggagggactgacacatatcacgttctggatcgacaatagggcagcagtgtcctggtgcaaccatcttagcagtcgcggtcccctcgcgcaggagcttaaccggattctcggagctgtcgaagctcaatggtcactgcgtgtctccgcgcagcatcttcccggtgcgtgcaacacgatggcggatgcggggtcgcgagcttggaccaagaggcactcggctacgtggcaagtactaactgaaggctggtcgcaggttctcgtgcctcgagctattcggaagatctacttggcgaactgttcgcccttcagcagaagtccctgtctgaagcatctcgccggctgtatgcaggttcctggcggcaatggactcagttttgcaaacagctcggtgtgtcacggtggctgccgtcccgcgacttcggagcccaatcgctatgcatggctttattcgccgctcattgctggtccgggaacggtgggcgtgggcggctatcccccagcacgatacagtctaaactctgccatgtgcgctggtatcatcgggtcttcgccggcttcgaccctcggctcgacgcacatcatgctatggttttgtccggaatacgacgggccaatccgccaccagcccgccgagatcccgtcatgcgcccagtgctcaagtggatcattgacaacctcgacctcagcaaagcccagcaccgcgtcattggtggggctgcggtgctgggcttcttttttctactccgaagcgcagagtatttgttggtgcggggacgcagaagggtgtacacgctgcaagtcagagatgtcgtagtccgcgacgcgaacggcctccagacgcagagtgctcggcaagcatgctccattaaagtaacgtttcgagggcagaagaatgaccaagagggacacggtatgcaacgagttctacggagatctggtgaccaaagattctgcccagtctgggctggcacactgctgctccaaaatgcgtctcagctcaggctcaaatcgaccgatccactgtgcagtctgtcgacgacgaagatgctgtcagctgaactcatggccaagttactgcgggccgctgccaaggccaccggcaacgaggcgtctcgagtgccgtgtcactcactccggagcggcggagcgacaaccctgctggcggcaggagtcgacagcacggtggtaatgctacatggacgatggcgatctgatgtgtaccagcgttacacgcgttacacagatgcaacgaggtcccgacttgcggcgcgaatggcgaaaccgcggattgagcgctgaacgaggctacaccgagcgattcggaggggttcacgcctgcctggcgtggctcaatgcggcctctacagcttactcaaataccacgtgcttggtttccccatttgtgccttatcatcgcgatgcacccgaatgctatgattgcttatgtacctgcacaggtgctgcggacggaagttgaaaacgttatatgagacgacggcaaacaaaatgttacttatcaacctaagtacgaatcgcgatttaggcgcataattggaaagagggatgtctcctctttcgtttgagtccctcccgagcttctggtatgaagaaacgaccgagaacgagaccgtaaaaaaaaaaatccgacttcaaccccgaaaaggatattttttttgatgaactggtgtaaaattagtcagcgaatccgacaatgttgtccgttttagctaattcgaagcctaacagtgttagaatctcacttttgtgccgtcacttcaaatcaccaggggtatatttttgattttttttagaaaatttgatatctggatgtaagtaacattttgaatgaactgtagacataagtatcataatgatcgactacaaccttgggctgcctattcttgctcagcaggcagatccgcagtagctttgtgctttttgttctattgcgtcttctttgctgcagtagccctcttctttgctgggttctttttcgtcgcaacagcctccgtgataccacgctggtcttggttagccttagccgccacggccattgccgcgcgatgctcacgtcgtgcttgtttccgtgacttggcatcttctccttcctgctcgctaggcttggtgtagaggggatcgctctgaaattcagcaggaacgtagggcctgatgttgtggtacatctgcgcaattttctcggtgttgcggataggaggggacagcgtctcgatatggtccgtcatcatccgctgcaccttctccttcgtggtgaagatcccgtcaatttgacggctcaaactaatctctacaggttcgctctcggggcctttcttgcagacaacgacgcctggctgcgatgcgtccatcgtgaaaatctggaacttctggatgccgtcaagtcgtttgtacaattcggtgagaataggtttgtaggacttgagcgctgagcttccgcgaggcagatgcaccgtgattgagctcttggacgccgaactaacagcctctacgagctgcatgcgtgttgagccggttaccgtgcgccttgatcgacatgttaccttctcggatgcgcatcttgtagcgctgcaaggtaatggggactactccatagcagagcgcgaaagtgggtcggcacacatgacctacgtaggggaggatgtacggaaacttctcacggtcaccccgtcctctcttacgctcaaccgtgggggtctgcatcaacacagccaggagcgtgtacaagctcgcggtgcgctcttgcttcgtcatctggtccagcgagcacagcaagaactccaactcatgagccttgcccttgacgcactcgttctcacacgcgtccgcatgaatcacctcagtcacacgggctcgaggactcgcgtcattcaaaaagatactaatatcctcttcatcttcggcttcactgctcgcgctctctgctgtgagcggttcctcgtcgtcgctgggtgacgcctccgaatcaggcgtaaagtcgtcgtcgctgctgtcctcgtccacctcactctcactggtagcagtgggatcgacgccagagacagaatcgtcggcagaatcaggctcttcgtctgcttcgcgacgccgagcagcaaggggtgccgtggccgacagagtcagcgccgtggagggggacgttgtggccggcggagtcagcgcctgggaggcgacgtcgcggctggcagaatcggagccgtggctggcgggcttggcgccgaggtggccggtggcgaggctgagagaggcagcgctggaggttgcgcaggctgcgcagttggcgctgcagcgcccgaggtcggtgctgtcggcgtcgtgggtggtgtctgcatggctgtaggtagtgggccgagtggcttttcgaaatggtatccacccccttcaaaattttgaaaatcaaaactcctcgctttctcacgacttcgtttagttgcgattttgaacttggcctcttttaaggttgcgattttgaacctggcctcttttaaggttgcgattttgaacctggcctcttttaaggttcaaaatcgcaactaaacgaagtcgtgagaaagcgaggagttttgactttcaaaattttgaagggggtggataccatttcgaaaagccactcggcccactacctacagccatgcagacaccacccacgacgccgacagcaccgacctcgggcgctgcagcgccaactgcgcagcctgcgcaacctccagcgctgcctctctcagcctcgccaccggccacctcggcgccaagcccgccagccacggctccgattctgccagccgcgacgtcgcctcccaggcgctgactccgccggccacaacgtccccctccacggcgctgactctgtcggccacggcaccccttgctgctcggcgtcgcgaagcagacgaagagcctgattctgccgacgattctgtctctggcgtcgatcccactgctaccagtgagagtgaggtggacgaggacagcagcgacgacgactttacgcctgattcggaggcgtcacccagcgacgacgaggaaccgctcacagcagagagcgcgagcagtgaagccgaagatgaagaggatattagtatctttttgaatgacgcgagtcctcgagcccgtgtgactgaggtgattcatgcggacgcgtgtgagaacgagtgcgtcaagggcaaggctcgtgagttggagttcttgctgtgctcgctggaccagatgacgaagcaagagcgcaccgcgagcttgtacacgctcctggctttgttgatgcagacccccacggttgagcgtaagagaggacggggtgaccgtgagaagtttccgtacatcctcccctacgtaggtcatgtgtgccgacccactttcgcgctctgctatggagtagtccccattaccttgcagcgctacaagatgcgcatccgagaaggtaacatgtcgatcaaggcgcacggtaaccggctcaacacgcatgcagctcgtagaggctgttagttcggcgtccaagagctcaatcacggtgcatctgcctcgcggaagctcagcgctcaagtcctacaaacctattctcaccgaattgtacaaacgacttgacggcatccagaagttccagattttcacgatggacgcatcgcagccaggcgtcgttgtctgcaagaaaggccccgagagcgaacctgtagagattagtttgagccgtcaaattgacgggatcttcaccacgaaggagaaggtgcagcggatgatgacggaccatatcgagacgctgtcccctcctatccgcaacaccgagaaaattgcgcagatgtaccacaacatcaggccctacgttcctgctgaatttcagagcgatcccctctacaccaagcctagcgagcaggaaggagaagatgccaagtcacggaaacaagcacgacgtgagcatcgcgcggcaatggccgtggcggctaaggctaaccaagaccagcgtggtatcacggaggctgttgcgacgaaaaagaacccagcaaagaagagggctactgcagcaaagaagacgcaatagaacaaaaagcacaaagctactgcggatctgcctgctgagcaagaataggcagcccaaggttgtagtcgatcattatgatacttatgtctacagttcattcaaaatgttacttacatccagatatcaaattttctaaaaaaaatcaaaaatatacccctggtgatttgaagtgacggcacaaaagtgagattctaacactgttaggcttcgaattagctaaaacggacaacattgtcggattcgctgactaattttacaccagttcatcaaaaaaaatatccttttcggggttgaagtcggatttttttttttacggtctcgttctcggtcgtttcttcataccagaagctcgggagggactcaaacgaaagaggagacatccctctttccaattatgcgcctaaatcgcgattcgtacttaggttgataagtaacattttgtttgccgtcgtctcatatactctagtacagtacaatatatcgccatactaaaggcaagtatggcaatatattggggtaaatattgatattggtacaatattgattgtgatgactgcctcgccgacaatcaatatcaaatacttcctctggttggaaatgatcaccggaaacagacattttaaccaataactccaccactacgtgctgtataaagctgcggattggacaaaaagcaagctcttgatctccgctttccatagccaccgatttcatctcgatcgggtccctgtagcccacgtcattttcattttaccgctccaagtagcaagccgatatcaagagggcacccccgtactttgtttagagtcgcgaaaacatgacgaaggccaacctggtggacatggagcgcagaggcatcatcgacgagctcctctgggctagccggatcaagcagaacagcggcaggaagcgtaagaatcgagatgaagtgcggacgaagctggcgagtgttcctgtggaggatagggcagttgagaggcgcgttgcggctgcttcagggctctcccggcacctagtacgacaagctgtgaaggaaggcatggtacggcgtcgtacgacgtttatcaagccggcgctgacccccgagaacaagctggaccgtgtcgaacatgcgctgtcgttcatcgacgacaagacgttacgcttcgagtcgatgcacaacgtggtccacgtcgatgagacgtggttctacgcagaccgcaacagacgttcctaccttgtatttgacggtgaagagatgcctccacgagcctggaagagcaagcgcttcatacccaagaccatgttcctggcagcactcgcacgccctcggtaagtctctatatttttataattttatactgtggataacctttgacactgtgaatgaaatttctgtgtaggtacgatccacaccgtaagcagagatggggtggcaaggtggggctcatgtctttcacggagaagtataaggcacagcgtaaaagcaagaatagagccaagggggaaatttgcacacgcaatcttgataccgtcgatcgaaatgtctacaaggactatctgatcaccaaggtgttcccagctatcaagtcgaagtggccaaggaaggaccgtgccagttcatcttcgtgcaacaagataatgcgaagccgcacgtgtcgccaaccgatccggacgttgtcgcagcgggcacagaaggagggtggaacatcaggctgttatgccaagcagccaactcacccgagctcaattgccttgacttgggagtttttgcttcaatgcagagcattcaacaccgtctaccaaggaagggcatcgatgcgcttatagcgtcggttgaggacgcattcgggagctcaaacccgacactgtggacaacatctttcttacgctacaggcgtgcatgcgggcaatcttggaggaggctggcggcaatctctacaagcttccacacttggggaaggccaaactccgacgtgcgaatgagctacaggtaagtctatcgtgcagtagagagctgtatgacgccgcacttgcgttactccaatcttcaaaccgtggtagtgcactgttctttaaatgaaaagtacttcgaagtagatacctttctccttctttgaactcaaagtacactttataaattagtatttgtcgtgtataagattcggccgtcccagaaaaactgccgacctatcataatgacttccggtgatcatttccaaccggaggaagtatatattgtccgatccctggtgctcgagccccgagacggatacccattgcctgaagtactagagccccgagacgtactccaagtacatgtcgtacttcgatagagtacaacgtgcacttcgaacagcccctctcctacaatccttttggtgagcctctagttactactaagtcggacagttgaaggtagttcaatgttgggcgaggcaaactgagcacggacaaagcgccttgctatccagttgaagcaagcaaccaatcaaagctcacggacagcaaacaagggcatgttcaaggacgtgtgcaaggctctccatatcacgcagtcacggtgaacgtgttggacgtggccgtatacgccgtgagcgcgcccagcaagctcttcgagtacccgcggtgcacgaagcggtaggtgccggcgacgctcgtgcgcccgcccttgcgggtgttccactcgcacgtgttcttgctctcagcgatgaggaagcgctcccagtggtagcgcaggtcccagtgcgcgtcggtcagcacggtggagtacgcgccactggagccaagtttctcgacatcacagaaggacgagaccagggtcaacgcattcttcgggtgcgcgccggcgaacactgctgaagccacactaccgacagcgtaggtgctggcgggctgcgtgcgcacgtagctgaaagagtaaagcagaggggacgagtcaaacaccacacccgtctgcagcgtgatgagcgagctgcggtcgatctgcagtggtgtgggccccacgtccaacggcacggacgggtcggccgccgacttcgccacgcgagccaattcctgctgcaccgcggccaactggttgggcccgaagagcgtcgacgcgccctcgtagttctgtgtgaggtattcttccttggtggtcatgtactgcgcgtaggcgttgctgactgaagcgagctcgacctcggtcactccagccccggccagcgccgtcttgacggtgtctcggatacgtctgccggccatggtcgtgacctcgaagttggtgacggcgatagcgaactggccgatcttgacgacctgcaccggcagaatgttgggcacccaaggcacgggctccatgaggccgacagccaacagcggcaccttgttgccgttctggcagtcctgcacccactgcggcgtctccttgatgacgtcgcctatggtcttgaagagcacgttggccttgaggttgccctccgtgaacatactaagcgcgcgtccgtcttcggtaccagcagcaaagttctgtcccacgacggcggggcaagttctgttggcgtaggggtcggctgtggtggctttcacgccgtccagtgtgacgttggagaaatcaacgtaggagagtttagccacagcggagcccttgatgagttcagagtcgcccttgatgagcgtcaacagcgtgtcatactgccgcttgcccatgatctcagcggactcgatcgtggtgttcccttcgccgctgaaggtgccgtctccgttgtcgatcaggttggggctcacgtctccggcgttggcgatgccgatgcccaccacgacgttgtctaactcgtcctcgagcagaaactctgcgtatcccttgttgtcgccactgatgagcaggttggctgcggtgagactggttgggtggacggggtagaaggccaagacgccgcggagcttgccagcgctgctgtagaagtggagcgcgcgcatcgtcgtgtcgatgttgctcgagtacttggctcgctccgactccggattggccatgtatgcatcaggagagcggttcttgccgcctttcgtcacctcgcccttgttccagcggatcgtgccgctcgccaccgagttgtgcgcctggtcgatggcgtccaagatgccgcccacgatcttgtcgaagttctcgctgatgtacccgaggatggacacgtcgtaaaggaagtagccggcagtgcctcccggtccagcgtgcgtgtgcgtggcgtgtagaacgacgttctgctcggtgtagacgccgctgtacttggtggcgagctgggcgaggacttcttggtgcaccagctgcatgacggagtgcaggtcgcagtggacgaacatgacgcggctgctggtgtcggggtcttgaatgaggaaggctctggcgtagaggcgactgagaattccagcgtccctttcgtccgtgctggcgaatcccatcatgatgacctcggcggcaggcccagtgatatcgctcttaccaacgccgatgttgtacgaggcagcaggccgggtgaagaccacacttagcagcaggagcagcagccagcgcagcagcattgcgtccgtcttgaaaactggtccgaggatgaggagcttgagcacttgttagcacgttcggaaatgagagcctcgagcctatggtggagaacggaagcgcgtgtatgcatgcaaactagaagaaggtcgtgacacccgtcgccttgaacctctatccattccggtggagaggggccatcagggagtgccacctctccttgttaaaccagctcgacctgatcagtcttcttcaccacagtaagcctcatggtacaactccatcgagactcatcaaagttgaagtggtcggggcttgaagatcgctaaccacttataatagcaacccgattgagctcctaccgctagtgcgttgcagaaggttgtttggtgccgtggcgcgagctttatgcgtgcaaaacgcccagacgcctgcatcagctgagatgaagcaggccgaactgcgtctttctaaggaagtcgtgcgaggtggggcgaagagcagtacattcgaaagcttagcccggccttgaggaggcgccttgagagccgcgcgcagatcatcggaggagcgcggcggcttgagaggtggctccgaaaggctacccccaatgggacggtgggagggtagcaaaagtcgataattccttagaagtccgcgactccggtcgtttcgccttcttatcgtcaagagctgcgattgagtcaagtcgtgctcttcaacgtacgattcaacggatgaacaactcactccattgggctggcggcgtcccatcgctttggttgtccatactcaacggcgaagacttgcccccccccctgatctttggcttgatccgagaagggcgtcacctgcttgcatacagccttgctcgatatattttttattgtcattccgtcacagacagacatgacgatacagatatagcaaataggatcgtcaaatgcgagcagtaactccctgcacggttattcgcggaggcacagccgtcggtcgttctacgacgatcgttagtgctccaggacccgacatttctcaatttgcagcgcaggccacacaagctcctccgagtgcttcagtatgactcctgcgccatcggttccagtgccagcatgggactcgcgagccgaccagcaagagagcctcgtcgaaaatgtcgtctcctcccacttccagcacgaatcagctgatagcaacctccttttgcctctggagctggacgacttcaactccgttggcgacgaaacataccgaggcgctaccactccccacgtatcgcgagcaaggccccgtgtacgtctgctctacattgatgaggctgtgcgtcaacgcttttgctccaatgcgcagtatcttttgcaaacagcgctgaaggacccgctggccgactccacgagtggtcagcttgcgcgcaaggcgcttcggtaccgcaacattatgagccgcaccgaagaaatcgacctccatgacccaacgtccgatgtctctgcgtttttcggtattaagtggcagcgtagctacagcttgactgatgactgaggaagtatggtgctgcgcagatgtcgtcaatacaagaaaaagaagaacgtgtaggttatgcgattcgtgttgagtctgccgttcccaattcctgttgagtctatcgctcgcaacgttttacgcattatctgctcctcactgtaggatgcgatgaacaacttcaactcgtgtcttgctgtgcttcatgcagcgctagaacttggagaagcagccgagtattcgctgacataacttcaggtctacgtcccctttacgctagcttgacgcgccggcgtctgtcaaatctgcctctgatacattgtcctttgtttttgattttcttccagacacttggtggtggctcgtacgtgtatccttattgatcagctaactacaatgggctccagtcgtcatgctgagattgaagtgagtgagtgcactgcggggattcttgctcttcagtgaaaaaaagcaaatcgagctcaggaagcaaccaagaagttctcgcctaaaactcagcacgcagcaacttgactgaagtaagccagttttgcgtaaactgacacgcaagagcacaagcgtatggtgggtgtctgctcgaggacgggctggaggttgccatcgccaacgccgtgcaacaaagggcaccgtcgcggagacatggccgatttcaacccggatatagggcaggattctcaaaaaaaaaactctcatgtgggtccgcacgcagtctgtcaggtcctaagccgtcgagagcgtggtctcagcttcgccgtcgtccatcccaaaaacgtgctgacgctggtctcgctgggtacaaactctgttccatcgactggcatcgtgataaggttgcggctgggaacacgtacgaatctcaagactatagcttcatgcacaagatataattgttgaaaagtggctcgagctgttaacgctgctgaaccaggctggcctacaaaaacctaaaatcctcttgttcctgtagcaaagtgggtttgcaaaatcaagcgaagaagagcactcatttattttcatgtggtacccgtaatagctcagggcaaaatggcgatgctgcgtcatctcgaattttgcctcggcttacatgtttgtatcgtcagaatgacgtgtgtgtcatgaatgacacaatctcgacaaacgaaaatgaaaaaccttacttcaagtacatgcattcgttctaacctggccgaggtcttgagctgccgtgcagtaatatcttttaccaaactgctactcagctttaacctcgatgtcgttccttcgccactcgacaccgaaaaattccgagacgtcgaacgctgggtctcgcgggtccacttcttgtaggcgactcgtgattttccggttgcggagggccttgtgcgcgatcagcgagctcttggatcttgcatcagggtcttccagtacggcatcgaggaggcgctgggcgttggcgcagaattgagcgcggatcctctcgtcggtgtagagcagacgcacgcggggcgatttcgtagctccggagcttccttcactccgactccgcagcagtttctcttgtaaaatacctagctgctcgtccacggattcttcagtgtcgaggggcaacaggagaccagtgacgccgctctctcgcccatgaggagcttgtcgtcgaagagagcagtcgacgctgaggcttctgctcattgcggcaggcttatttgggtccatgagaacgggggggactggagtcgtgtgcgtccggcgaggcgaattctgaaatgaagccaaccgcccgaaagccgctcggaacacgaggagggtctgtatcacccgcatcaaaggcacgcatcccatagaagatactactagtacgaggcaggaaaatgagtgcagcggcgctgcccggtaaactcatgaccaaggcccagatgagtcaatccacctgcctctcatcaggctgatttgcagtgcaaatacctcgctgaaggtccagccgttgaagacagagagggcctatctatcgccaaggccttccgccgacgctgtgtagatgtagatcaacacgaacgctggagtttctcctctaggggtggcagcgacctctcagagagaaaaaaaagcagcggcagtctgcccatagctctctacggccgttccaagaggctaacgcgcagcctaccgacatcgtagcggagagcagcgttgcgaccagaaaaatctggagatcgcctttttcttccatatcttgcacgacgatggtgggcctcctgacgacggtccaaactggacccaatcttgccgttacgacggcatccgaccggcgttgcttggggtcgcacgcagctgctgcgctgcagggttcccacagcgggtgtcagcaaggcggcgtagcttgtgtcgaggatctgccgcctctgctctcctcttggaaacactccgcaataccgactcagcaaacattccgaaatctcgagaaaattgactcaaaaccctcgctgtaacatgagctgatcgcttggagccttcgtcattgttcagatgcattcgcgtgtgatatctagccgtttctaacggcagtgcccgtcggggcacagttgggcgcgaacaccggactgaggagtggatagagcctgtagacctcgcagttcctgagcgctgcttctaggagaaatagccttcagcggttgatagcacaacagcaaaatgacgctaggaccgagcgctgctgagtatcccttggtcttgaggtagcggcactaatagagcacccagcctggtagctttcttcggattacacgtaaccgaatgacggatccgacacagctggttcccaaagtcggtgtatagcgttatccatgaattagcggtaaccggatttttaggtcaatcctacattttggtcacgggtcaaatccttactttggtcacgtgacctaagcgaatgaggtcacatgtaattcgcaaacggtttggttgttaagtaaatgcgttatagcgattctgctcctgacagagagcgacttccgcaccattattccgcgctgtcgtggtcaaaagagtcgtctggacgatagtctgctgttttatgatccatctcggcatcgtcggcctctagcactagagcaggattcagggtcatcagtggcgatggtaggctgctctcataagtctttgctcttctctgaccccacaatgtcggcggcctgacgcaatggataacaacgcgcggtgccgcatattcgtgagaaataccttttcgtgacctacattacgcgatgggggccgtctcatgttgaagtgtcaagctcgagtgctgagctgtggtgcgatgggttagctacttctgggcgcgtataaattttctaagtgaatgctacaaagcacgaaatagaatccggagacgatgtcgaaatttcataatgggttccctgtgtcgacgaagttgttcatgggagggtgtgtagccctacagtctacttgtactattgctataataccatgtcgcactatacgagccggttgcctctgtgtactttgtaatcgttgagttgcgttattgtgtagaatgaaagctaggtgcaattctgtatggtaggcggctcaaaatatagcagggtatgaaatatggtaggcaaatacatgataagtgtagtggaggttttcacagaagcgagcccagcccactcatcgggtggcttctacagagcgacgctaccaagcgggcagtaggaaagggaggaacagcgaaaccaatgcaaacgacagagagagaggggtcggtttggtagaagacgctagcagaaggcactagcaggagtcagctgaaacacatacacagattactttgaaatcaacctcttaagctaaacagagctttggtttgctcggagcgctagcctccctggtcctttataatagtgttcctaaacctacttacagctctgactcttcgctacaaatacagtcgttatgcctccgagacggccgagtcgccgcttaccgtcgcggtggacaagagtgctcgcgtccctccaagccgaagctggacgctcgaccagcggaccttcactctcactggcaacaccgtagcaagtgtgcatatgctgtcaccttgcaaggtaggcagagtgaattgtaagcgctagaggatcgggcatttgctaggccgttagttaggctaaatgactgcaatgcgccgcaccttgaaacgaaacgagacggcgagtcgagtgtgcggccaaatctgtgcagcatactcatggccttcggcaacgctgtgatcccaggaacagcgggcggcggggtactcgacttcgacctcgagcgaggttacggggccccacacgtcgagcaagactgaaggctaggtcgagataacgctacgtgacgttgagtccatgagctcaagcgctgaatgcgagcggagtcccgtaagcacgggttggtgactttgtacggtgctcgtactgcaacatggtaggtagcaccacctcttctatctagggtattgcgatctgcgctcatactacgagcatcacacacgcgtggtagcagctcactgtttagcaatgtaactactgcccgtgcaacatgcatggtaggcggtctcttgcagtgtaaatggtaggaagcacacattttagcatggtaaggacttgcagcgcaacatggtacttttgctagtagcaagcacgctgtgcaagatgatcggcagcccacagtgcagcacttagccagcttctactgtaacacagcagcaactcacggtgcagcacgtcgtgtcctgtaggaaaccgcactgacagagtacaaaagcattgagagaggtgtcgtgtgtactgagaaacttgaatgatgtctgaattcttcaggctgaagagaggtggaccatcgtccgcttcgaagctgcatacttaagtatgcattttgctctcattctcatgcgggcgggcgcgcatcttaccgtctgcatcaatgggtgtgacctgttaagtttggtcacgtgacctagcgtcctgatgtgtgacctatttgaccatcatacccgtgaccaactgttaggattgacctgttttcccctcttcgtgaattagtgaccaagagcagtaggttccttggtctcgactacaggaaaaatgaaatcgtcatgaatgtccacgggcagacaccaattggacacttgagccggaaaaaaataaaaaaaatcgctgctgtcgtcgagaaagtccaagccaagcggctaataccccaatcctagaatggccgcgttacatccgaaccagctaaagtgtatcaaaggcgggaaatgggcagcgataagcaaactccaaaaacctaagggtctcgctgtggcagcaataggattgccgttttcagggcgacataagcttgtgcgatgtgattacttcgttggggtcacgtaagctgcagtagtgtcgttcgaatcgcgtcttctttcgtgatgctccattgcgcgtactcaattgtgttttgaacagggagattcaagctccggaggtgtagactggcatggatgcagcgatcggagtctcaaaggcggaagcccaaacagcaggaaccccagtgtgcctcgtcatgttgacagtttccgcgggatggcaaaagtcttctgcataacagtgtagcaggacacaggcgcgctatccattccatcagtcagtcatataactcttgacacttgagagtcttcttcactcggcaatagtgggctgctgcaattgaaaacaacaccactaacatcgtcagcgagaacaacagcgaaaagaactgtgtgttttggtcaggcattaccgtacacggtgtctgaactgcatgcaccgtgtcgctgccagtctcctgttgctgctgttgacttgtgggactacttccgtgaagcacttcttcgcaaagcttgaccacgagacgatcaacacgcagcggactcctacgcgggctcgggcccatcagcaacaccacctcacgtcagaaaataggacgcgtgcgaatggattccacaaagtaaaagtaacatgagcaggtcagagtcgtctgaaataggatgtggaggcattctccaacgcgctattcctgggggcactacatccgacggtcgttctgaggctccggttagagctcaggtgaacaaaggtgtgaatattactaagtattgaccaagtgcagagcattgaccaaagggaagccactggacagaggaatcgatggccacgccgcctaggatgctgcgaggacaacgtgcgcgctcttcactggactatgatgcaggcagactcgttgctgctcaaagttcaacggaagtgtgaaccaacgctgcgttttcaagcaagtggacaataggcaccagtgcaaagctgtggaaacaaacgatttgatatcatttcggtcaccgccgcttgcttcgtgcggttcgtgtgtggtcaagccgcaggtttacatgcatggttctgagaagcatgtctacgacgccactctcagtggtgtccacatttcaacgagtcttctcaatgagtaaacttcttgggtgcgatcttaatatgcgctgggaattgcgctccaagctagcggccctcttcccaaatgtctaccagcgcattctaccattgcgacggcaacccagaactaccccggatcttgccgcaccatgatggcgtcgctgtagtcgcacacgattgcgctggccacgctaccgcttttggagcccagtgtaccaaaggaggcgcggactccagctccgtccaggcgttctgaggacgtgactaactaagccactgcactgaaatagacgccggttccctctcagaaagatgtaccctcgacaatacaaatccataaaaatggactagtactcattctgctgcgcctggggcctctccgatgagacctttgtgctgtaaggaagatcgaagccacgcgtgtgataagcggaaggagatagcaccgctgttgccgtggaatcgccgcatgtgaatgactccagcatcgggaagatttttaaatgggtcttatgcagaacaggtcttggatttgactttttctatgatctcgtgattggatgacatttgccatctttcggcaacctaccggtacctcactactgtacacgagtttacgggtggcaaagcaccctcgagagatttcaagttctacccgcccaacacgccatgcaccgagcctcctccccatccatgccgccaactacaacgccttgagcacccgctcgcgacgagccggaccgacaacagaagctcaacgcgagcggtgctctagcgtctactacggcctgccagtggtggctagcgaggagatggcccactgcttcgccgcatgcaagctcctgagcagaggcatggactcctgctactccgcgtcggtgctccagcgcagcgttgctgtatagtccgctacgacgaccacggcgttacatactgtgacaacggggatggacaacaagaacgtcaagcccaagacggatatcggtgtgcccacgcccacgctccgccccagacctgacctccaactcgatggtgtcaaggctgcccactagtgttctccatttacctgtaagttgattttagttcccgcttacttcccggaagtgaggtaaatttacaggtaactgattaagtgtcgattatactggatagtatagcatatgccttctctataatacgtcaacttatctggactagtcactcccgcaagacttgcattttcccttctgcgaggaaccgatgcgagtcaggtaaatagcaatgtcgagcttggtagttgtgcaggtggtgctgatctttgaaatgcatccaagaaagaacgcgttttacctccagggacgcagacgcgcatggtagtcgagtcgttcggatgagtatgtctaaagagaacttctacaacggactgcgatgtcttaactggaagaccaagaacgaggagtgaaagagcaaaatgttcggacggagaattggagggagggcacacgccggagccttctggtattatttttattatctctaactccaatcaccggtagcctaaaaaaagttcccgctttactttccgtaaattaaccggggtaagtcttaccggtaagggtaagtgcgaacactgctgcccacgctacgagctcgtggaagtggacacatgaacagcggcatggtgcagtttgttacgtctaacagcggtgccgagaagaccttccagctgttcgtcatgcgccaggacaagaaaacctgcattggaggtggcaaggtgggcgagcccggcgaagcgcagcagactgaggaaaggatcaggggtgcagaagtcggtggatcaagctcttcaaaccgaggcgaaagctgcgccggagccggaccattgtgcgactaaggtttcctcaatggctgaagctctggcgcacgcactagagcccactgaagcgaaggtgcctaaggacgtcgaagctgccgaggttgccctaaagaaggtgcatggggtgtgggtggggcgacggagcagccgacattgtcaagactcactgtactatggtacagtgcaggctacatcgactacatcaagttgagcccagtgcgcaactcaccgcgtgcgctataatgaaggagctaggcaaccttgcaagggtacattgggggcacaccatgggtcatcactcgagacagcggctaacaacgtcgtctttctcgagtatttcagtcttacatgcatccagaccagacaggaagggaaacaactaaataatactagacacaaaactattcatgtattgatactcattaactctcttacttcgaagtaccttacatatgaaagtcaatgccgccttggtcaaagcattatactcggttgttggtgtgctaatactatagcacggcctgagtctagcgaagtcgttgccaacgactccttggcccagacgttgtagtttttgcgctgttttcaaggaatacgtagtctccataaacgaatggaatgcagtaactcaccacatacatataaggatgagcagcatgtgaggtcttactctggcgagcagctataatatataggtacaggtgatagcttactactactaacgactaagggggtgatagtgaagcttctacgtagtatttggccctgcagaatgtctcctcgtccaaatagtcggcccacatgaacagctttcacattgccagcactcagtagagcaaaaagatgaactgataaggtatccaagaagacaagttgagccatgatccactgttgcggttgtttggtccaggtcttgcgattcggtcatataatcagcatgttcaaatcctggacctgatctgcataagaaccaaaataaaggcaacccagcatcgctatcatttaagttttcacattcaaactcggttgtattcacctctgggtcgggactcgtgaggctctctcacgagctttagaataagactgcgtgtgcgatacagccgcttggaatcgagtttgcaatcgcttttcactcccttcaggattgaaaataaagacttgcgaatgtaagactttcattcgttgtcggcaccgtcagtggatctagctcattccgactcagtggcactgttgcgcctataccatctctgttgaccggcgatgaagaacacgcagaagctgatctccttcttctacgcctcccatgagtgactcgacacctcatcgcttaacactcggtggaaacccaacagactagttattacacttaccacaagccgaaggatcgtcaaaaataaaagcggtaacacttctcctacgtcgatctatttgaggagccacttctgctacagccgccggctgtcttaagacactccatcgtgtcgtcctaccaagcttggagcagagggcgcatgttgcgaataatgcatcagccccagttgcagcagaactccacgacgcggccgtccaaatatcttcttgctgaacgaatactcacaccgtcagcttggatacaggggcttccccccaaaggtgcaagcacaacgcgttcaagcctcgttggttgtatgacgctgacagctttatgggctgcaaatacctcaaggcgcagttttgctctcatgccctgtacaagactcactcgtcattttcctgctactttactactattgcgactgaccttcgtgaattattattgttgatactatagcttgtgcaacattggatcgtcaacacgacaggaagaccgaactggaatttaaacgatggcgtgacaggctcgaatgtgtagtgcgtttcgaatgaacacagtcacgagggaagctggcgctttctttgaattccttgcttgtttggttgttctcaagttctagagtgaggaggttagatagacctcagatacgcctacaagctctactaggatacctgatctaatctaaccacctcgtggtcttatcctacgccagcttggctctgatcatcctcgatcgacagcccagtgtgtggtcaggtcgtgaagaccatcgccccactacaccgccccaccaagacttgaccacgccgttgaaagtggtgatcaaatgttggcttcacaggaatgttgcttgaatgtacccatgtacccgaatttcggtacaccttaccagtggcaactttagcacttcaacttgaagttttaaagttgctcgactgctgaaacaaactccaagtcgctcttaccagaagcatactgcttcaccatcacgggaatgtccttgtacaaagaactgagagactcccaagagtccttaattggttccagacctttccaccctaccagaacctcgaaacatctcttggccgagttccatcggtgatccttgagctccgcaacagtaaggacaataccctgagcagccacgtgctcccgtatttcctctgtcgcctcaaacgattcatccgcatagaacttgagacgcgaagagtgcacgtctgcctccgaaccagtcactaaatgctggacacggaaagagtgttcgtctgaaccaaccacttggtacgggcctatccacgtgactaaaagcttgtcgttgtgtttctggtctacacgagatctcaaaacgtaatctccaactccgaaatttggtttccttgcccctttttgcatcgcctgattacgcctggtttgatccgacctcgctatctccactttcctgtgcatctcctgcacacacactcgtagcttgtcaaggttcttctgaatctgctctgagttgatgccaatctcgacaaaagtctcagtgtctttctcaaaagtgaaatctagaggagagactgcaggtagaacacaaaacaattccacgggagccttgtttcccaaagaaggtaccggtgtgtgattcaaattcgactgcaccgccgagataaaatatggccaatctcgaatatccagtttgctttcgagacaaagcacacgcaaaacttgaatattatctcggttcaatctctctatagttccattagtccacgggctgtaagccacggtgaaccgttgctggcaaccaagtcgcttcgccacttcaatcatcacttgattcttaaagtgactcccttggtcactaatccacacttggggggctccaaatctactgtgccaatcgagaatggcctcagcagtcactactgcactcggtgttgcacatggtaccaactcacaaaaatgagtcgcatcgtccttaagtaccaatagatacttgtaggtaccgtaggattctcctagatgcaaataatctcagtgcagtgctccatttcgatccttacaacggaaggtgtcagcccatggtctggttacaatcttccccccttttacatgctgacacatgaaacagtcagcaagaaaggttttgaccatggctgagagattccgtacgtaaaatcgtcgattcatgacagccattaaggtttcgcgacctctgtggtcctgcacgccacagtgagcgaccacaagtagccgctgcagtagggcaggctcattgtctgggatccaaatgcaaccatacctgcacagaagtccgttatcaccacgattcaaacgtttaggcaggctcacaatgtgccgctgttgagcctcctgcagttcttgcaccgtaggtcacacgaaagtaccgtcactaaatggtcgaatacgttggcggcgtctattttggtctttaggctcgttgtcttcacgctgccgtctcaacgtcacacgcttcaccgccatatttggcattccactcgcacaggcccaccgagaaaccatgtcggctcaaacgttgctggttccgtcgatatgctcgatactgtagcggtattccattagtttcatggcccacctcataagtttcccgcgtacgtgctttttaacttcgttgccaggtgcaaatacatgtatcaggttgcagtggtcgcagtacatgcgaaagccaccaggacgcagcaacaggtaactgagcttatcacatgccatgatgattgggtatgactccttttcgatgatactccagtttctctgagcaccagtgaacgtaccaccgagacaaatcaatagttcgtgctgctggtcctgaatctcagcaccttgtttccactcaggcacttgcgagcgattacagaccagcccacatccgaggcatcagtcaggagaatcatttccgcgtccggcttcgggaacgcgaggctagctgactcagctagagctcgcttcatctcgtcgtatgcctcgcgctctgacgaggtaagtgcgactgggatgtccgaagctgcacgcttggtacgtctcgaggctttagccatcgcttgatctagtgcatcttgcaaagggcgagcgagtcgtgcatagtcaatgatactgtcccgcatccagttcgtagaacacagggattgttgcagctcgcctgcattcgttggatacggcatacttcgcaaagcagcaattcgctctgggtcatgtttcactccttccccattgcttatcttaccacaccattttacttcttgcttgtacaggcaggacttggcggcactcagcttaaaaccgaactttgccgtgagctcaagcagctcctgcagtttctccaggtaggtgtcaacatcgggggcgtacagcaagagatcgtcaatccagactaataaatgcttgtacaatagtgcggcgtagcaacgctccatggtggactggaagtacagtgctgcatctgcgctgccttgaggtacgcgtcgtggagtgtagatcttcctgtgcgtcatgtacgataggagctcttgacactccttggccaaaggtagctgccaataaccttttatgaaatcgaaaaggccaaagtgtctgctgccccgtacattttccaagtctacatgcaggttgggcatcactcctgccatgggctccgtttgcgcgttcattggtttgtaatccacagtctgccggaactcaccacctccacgtttgcgtaaaggcaatgcggcacaagcccaacgactcgttgggttttcatatacccatccaagtttgacaagcatgtcgttgaacgactccagaaacgcttgatacgctggtgcgtacttccgtgctttagctttgaacggcctgcagcctgctttcatgtgcacgcgcattggttctacgtctacaggagggtcgtcaccgagtaccagcctccaaacgtcgcatagacgatgatacgcaggcgttcaactttgctcacgggaaatccttcctgcactgctcgttcaatcatcaactcgacagctttacgaatatcatcatccgtattgctgccattcgccacatcaggttcctcatcgtcatcctctccatcatctctacttggcactgccagaagctccaattgtctcccaacatcaataccaagcatcttcaatacatcgttcccaaacaaaaactattcatcatcattctcgaggattaaacacgtcaccggcttgttgatactcaccggacctgcggctgtcatgagcgacaagcgcagtttcgcatttttaatgtgcccacgtcttctttcctccaggtaatttgcactcgacgggattttgcaatttcatcacttcacactgcacagcatgctcaccaattttttgtagggtcttcgaactgataatcgatgtatcagcaccagagtctggacaatactccacatcaacaacgccattgacacgcaaaacaacggggtttcccagccccactggataggcactacctaattcgcttgagcattacggtgctccccaggtttcggcttgtgccccgccatggagttgccttcgttcttgttggggcagtcggcccgtttgtgcttgccgccacaggcccaacaaccccacttcgatcttgtcgcactctgctcggaactctcctgaaatatcggccgagacgctggtttagtgtagtttccctgcgttgccctggcgtctgacaccatccgagccttctttacaggtcgggccgacgccagtcgagacgactctgcatcagaaggtcttctcttgtttcgtttcaacgccaagtcttctcgatcaacctccaaagctttctcgctcacgatcttgaagagcacggagacgttcgacttggccagaggtaggcgaaaatcgatttcatttttcaccctcaccttcagttcactgggcaggcaattcaacaggatcttacatttcttcttgataccttcctcgtccgagaaaagcgcagtcaaaccattgttttttacgatcgtgttgcacagatgaaagtagtccatcactcgggcgtcaacgtcggtcttcaagttcgacatcacaagttgcccttggaagagctgatcaatgttcggaagagcgttgttcttgaagctctgcaccgttttcattatccactcccaaatgaactcatctgtcaggtcctctttcttcttttcccacttggtctcgcactgtgtctccaagaaactgtcatcgaaagagttccgcaccgatctcatcacagacttcaaatcttcaccagacgactcacagcgcgcccgcatgatctcctcgtactccagtcggaggtcaacccagcgggtgagcgcctcatgcgagatgtcctccaccttgggcgctgctgaaacagcgaaaatgggatgcgccacagttgggatctcgatgtcctggtttgcggaccgaaaggccaaacctcctcctagcccaacgggggtggagtcagtattgggttcactaggttcgctcactcttgctttccgagcacgtttcttgctcttgcctctgttcgacttggcttggcctgcccgtgccgtgggggccacaaccgtcttcctcggtcgtagcatccttcctgagctagccgctggcggagccacattgtcagccgcagcggtggtagcattcgtcgacgtagttgtgttgtccatgtcgattccttcgacaccaaaatcaactttgtagtgggtttcgaatgaacacagtcacgagggaagctggcgctttctttgaagtccttgcttgtttggttgttctcaagttctagagtgaggaggttagatagacctcagatacgcctacaagctctactaggatacctgatctaatctaaccacctcgtggtcttatcctatgccagcttggctctgatcatcctcgatcgacagtccggtgtgtggtcaggtcgtgaagaccatcgccccactacagaatgataatactaaagaatatgtccgagcactccagcagaatttttttgccactattccagcgttcgtccaccaagtctcctcagcttggagccatgccgccaccttgtagcccctggttagctcaagtttgagatgtctcccttcatgatcgcgtccaagttggaagaattaatatacacgggtgtcaaaagtgagaagttcccaccacgaatcatggattatggagaatcgatgaaggtgttacagatattttctggcttgaaaccctactcagcatttcgcgtgggcacttttcctccgccactcgactccaaaaaatgccgagacgtcgaaagcttggtcccgggggtcgacgtcctcaaggcgatgggtcattttccggtagcggagggccttgtgcgcaatttgaccgttcttggatctggcctgaggatcttccaatgcggcgtctagaaggcgccgcgcgttggcgcagaattgatcgcggacacgctcgacatcgtagagcagaagtacgcgcggcacattcgctgcgccagagctacaagtacgctgcagcttgtcctgcacccgctggagttggtcttccacgaattcgtcgtcatcaagcggctggcaagtgcaatggcggatggcgtcttcgcttagctttgctggctccatgggaaggttttgggtcgggcgctgtgagtgtgtgatcgatggcgcggattggtaaatgaaagccgctcgaaacacagtgaggtcctgtaccgcagcgctcacgcaagatcacgcatccagccgaagatattgtgaatatttctgacgaatcgctggaggcccaaatgtccttcatatcatcgagcatttcatcaggaactagcagaaatctggacctcgcaggagccgtaacccggctgtgtaccttgggcaataactctctgaagcccgaggccaccaccgccgttgcttgctacatccgttgcaacttgcaagggccgacagtctctttggtgtaaatgacggcgctatcttctccgtcaaacgaacacgtacgacgggctgcaggcgcccgttaccatcgtgacgaagaacttgttcgagctaatacctccaaggctacgctgtaagaatacaaattgcggtcactgatgcgatctcggattgagcctctgcacaaacgcacaaatacgttttgctgttcgctccattagtgttagaatttatggcggggagaggttgtttgggtgggtcttggttctacagcggaccgtgcgctcaagtgtagcaacgacaaatgtgtctaacgatgctgctgtttcgtatcatgactgggccttgatctacttacgactgcattaaaatttgatggatcttcgagaaacgttgacagcaaggtggtgaagggagatcggcgaccaacgagtttgagcaacatcaccgatgtctatccgtacattgacccctcgtgcagagcagcaacctcgccaaggaaaaaaaactcccgtatgcagaaggaagacgcgtgcgcaaaactcattcaattggaattattgttatttgcttcaagtcctcaatagacagacgttcaagagcaagtcggtgcgcggatgtagtcctgcaacctaatcgcgcgacgaccacttggtgccagccggggttggagccggtgcctgtgcggcagcctccgtcatgggcagcgtggccagagcgatggtggcgacggcggcgacagcgaggagcttgacgatcttgatcatggtggagtgaaggtgcggagtgtcgggtagttccgggttggttgtgctggagatggcaaatttggttgtgaggtgtggaatgatcccccacgctatgaacgagttgcttgaagggtgatcgagcttttggaaaggaaggtctggaacctcgagaaccgacggacgtctccccattcgtccagatgttggcgtcgtgcagagctcgcagatcgtcgctggaccctggcgacagcttgtacaagcttatacaagtacacgagcgaatcattacatgtaggggggcatctgttggtagatctacgcacatcgatctcgaggacgttcctcattgatcagcgtcgaagatcgccacgatcactacaataacgtaacgctagcaaacccaacttcaaccgcgtgtttgacatcgaagccaggagttcttgcagcaggtgctgtgatgtacagacgcgtttgcgacgcgaccgaccgacagcctgttgttcgagagtaaacttgtaagtactcgtcgtacgaagtactcatcatcttgcgccgcgttttcttgagagatggtacgctcgcttcgattcttgccacgaattctacatggttagcgacagtaacttactcttgaaccacaagcgaccaggacagctcgaaagtgtttgagttgccgttgaaaatatcatctactaacaagacttgacttgactgcctggaagtgcgttgcaacggcgtacatgtaagctcgcagccctgaggtgtcgtttagcttcgagatgacgtcgttttttttccttatcatacgccgccgctcacggatgaattgcagtagccatgactttcccgaccacgtggctcgtaggatcttgagtttgtcacacaggacgcttcttcttcatgaattatcccatgctgctgctcttctacacctgctccagcgcgagatttggtctgtacagtgcactgtacgtcctgcccgattctgaagcgcgcatcctccaacgtatgcgtgttttcattgttttccggcatcacccggtcgtcgtcgcttcatcgcagactgcgtcgagcactgagcgcaaccccagcatctggacgaacggggaaaatatcctggattccgatctccgtgtctgttgtactgttgctacttcctcccagaagctcggccgcgcctcgaccttcgtccatctcaaccaaattcgccttcgccagcacaaccaacgcggaacagatcaacttcactcccccatgatcaagatcgtcaagctcctcgctgtcgccgccgtcgccaccatcgtcctggccacgctgtccctgtcggaggctgcggcgcaggctccggctccgatcccggctggcaccaagtggtcgtcgcgcaactaagttgcaggcctggatggatccgcggaccaacttgctctcaaacgtctgtagattaacgaactggagcacctaacaataaacaataaaccgcaccgaatgagtcttgtgcgtgggtcttctcgctgtacgagagatttcttgcgttgccgaggttgctggtacaattacacttgtacagtatcgatgttaccaggcaggtctcgccgatgttgcgcgattgtgttgtcgattttcctgctgtcaacaagcagcagtacggttgtaagcagaccaaggatagtcacagtgattctacagagcagcagcatcgttagacgttggcgatactgcacttgagcacaaaactcagtaggagaaaaacaagctctacccacactatcctcattattcgccatgcgccatgcgccacagccccaacaccaatacggacaagcaagtgcacacaatgcgtaccgcgtcgagtaatgttactgacttctccatcgagacaagaacatggggagtggagcatccgcaaggatagtaacacggcgccgcctaggtcttaaagaagagtcgtaggacggatttctcctacttgcgctatttgaagacgcgctacagccgttgatcgttctgggctatctaccttgttatcagtctacgcggtgcgtttgctgggccagcacgttatatcgaggacacctacagccagacctcgcccgtgaatcacattcgttccatcatcaagaggtcgttggggaagcttcagcgctcgtcggggtctactagtcggtaagcgtgctcaactggcgcacaagcggcaccactaccgcggcgtcgtgaagacttgacatacctatatagcggaccgatgtatatatatgattcctgtcgttttcggatgagaagaagatatgatgatgtcggtaacagaacgagctttgacggagcacttggatccttactgttcaagtgactttgtgttgcctttttctcctggggctcctggtcaaagtgaagtcgaagtcgagctgaatttcatgtgatttcactgtggcaagctcaacgtaaaagagcttgacgagggcttctggccagtttgaagagcacgtggattttatacaccatgagcgtacgtcgatgataagtcagcggagctctcacttgagtcagctcgccaccacaaaatggcttcgctggtgggttttgacagtccgaagtcggttttacagcatcactttatcgtatgaacaattggagattttattgcattttcaatggagagcaacctgtacaacggagccatccaaaaacgcttacatgcatatccacgtagtgctcgacgcgcgcgagacgtcgagctgccccaccccagacctcatctactcggcattcacctggatgtccttcctccgccactcgacaccgaaaaacgccgagacgtcgaacgctgggtctcgcgggtccacttcttgtaggcggctcgtgattttccggtagcggagggccttgtgcgcgatcagagagctgtttgatctagcgtggggtcctccagtacggcgtcacggaggtcctccacctcgagactcgtaggcgtaagcgtcgggaatggctggagatcgggccccatagaagaaatcaattgattctctacgagcaaaagatcgcgccgctcactcattcaccacagttgagtccctcgaagcctacagtcgtgaccaatcgatatcctctggactgttcctgcctacgagcgagacgttcaaaagcatcgcaacccacaccgtttgctgcttcctacaagtgttgcaagtggccgacgcgaagaagactacttcctatgtacatctgcatggagtctctattgcgggggggggggggggggggtaacgcgcgaccagaaaaacgtcttgtttgaaacaagttgtttctaaatgggatccgagaggcgttacattacgatcggagggacgcgctccagcgtggacagactttcatggcacccgactcgacgcagctggtgcttgtggaagctggggatgaaggaaaacaggaacggtgcttccacgtatcgtgtgctttcgtatgggccttaatttcgttctctcatgcgatgctttcttgcacagcttcggcagtgaatgggcgtccacgcgtttctgatgccacgtcttggactgaactcaggaggtcatagttttatgtgcgtttggcggggcgagcagcacggtacaagttgttggatatcaccctagcagcatcttgcagccctgggctctcctactctactacttttgagggggggggggttacgattaaccgtgttgttggttatctggacttgaagtgctcgtcatcgtgatcacgagtgcagtaacagatgcatcacctgatgtttccgccataagcattatggtcacgtacgaccaggctaccaatcgctgagcttgattgtactgtacatgtaatgtgcgttcatcttgcttggagcgttctaaccccccaaactttcttcgctcctagcgctaagcatcaagctggcaccactacagccaacgccgctaattttcaactcgaaagagtatcaaatttttgagcagtgatttgatgaatatagtaaacgggttgccgcctctgtcaatgatgagtggttcacgcccaggtcagcacgaaggagctactacgacgcattgccggaatcaggtactgtcacggtggatgtagctgctgtagtgctactgggggcggcttcgtcgcgtgccccagacgcatatgtcttgcgaacaagccgcatttcttcagccatcacctgcgaggctacagcggaaaactccttcttgaccgggtcgataaagagtttctaggaggggaacaacattcaaacaccgtgtcagaaaactgcaggtatgggtaacttgaatctgaaatcgtcaccttaatacggtcgtcaaaccgaattatagcctggaacaggttcacgttctcggaagcagagctgtcttcgatcagcttgctgtaaataagcgccaggatgtcgcacagagacagcaacacctctcggtagtccagcgggaagggctacaagcaacaccgcagcacaagctgtattagcgccgcagcaacctccaactaggcatgaaagatcaagctacatacgatcggaggcgtcatgaggcggcgatatactggacgttggttccacttgtgcatcgtgggtcggaacggctcgttggccgagtactgcggactgctctcctggcccagcggctcgtgcagcgtactcgacgtcgccaccatcattttctgccggcaatagtcaaaatgctcgtcagtcttctccttttcatcttcccacaagtcaatccccttaccattccctgcaccgtcgacgacgagaagtaaaactcgagctcctccagcagctggcagcagtccatagccagcagctccgggtgcagcgactcccccacgagccggccgagcccgataccgaggtagaagaactgcgcgcctcggcggatgctctgcttgtctccgaggtggttcatcacctgctgctcccgcagcagcgccacgttgagccagtagttggagccctcgtgcatggccttgaggtagttccagtccgagcgccggtgctgcaccaggtcctccaggatgcgcatccgctgctgagccgtcacctggcgcagcacagccgcctcctgagccgccgccgcagctgccgcctcctccgcagcggctcggtcggcggcgttgctggcgcggtcctcggcctcgtcccccgcttggctgacgctcgagctctgcgacgagaagagcagcgagccgaaggacgacgacgcgctggccagcgacgacgagagccccgaggtcagcgacgcaacggacgccagggggtcggccatggatgcgtccgtcgtggcgctaggcgaagaagtgtcggagggctccgatgccttggtgctgctgctggaggtgacgctgctcgggctcttggctagaggcgacagaactttacgcccgcttttggccagcttggacgccatggagcgcgccgcggaggaggccttggacggcagcttggacgacgaagagctgcggttactagcgctgctgtcgtcgtccacgctggcctccgatgtgtcgccctcggcgtcggcatcgtcgcggcgagtagggtagtccggcagcgcggagggcggcggaggcagcgacgccagcacctcctgctcgctcagcgcgggcgcgtccggcgttgctgctgctgctggggcatccattttggcagtggatcgctcaccttcaggatgatctcagtcgacataaaaaagggtgtttgtcgtcgtttgataaagccaagaggtacgcatcggacacaacataacgcctataacgcccggcaaccatcaatgtgttcacttttcactttcactttcttcacctcgaggcgaccatcactcctgcgggtaaaccgagcgaccatggggcgcatcgcgcggctggagctcgagaacttcaagtcgtacggcggcgtgcacgtggtggggcccttccagcgcttcacggcggtggtggggcccaacggcagcggcaagagcaacgtcatggacgccatcgcgttcgtgctgggcgtgcactcgcgccacctgcgctcgacgcagctcaaggacctggtccacagggccccgagcgacgacgacacaaccagcgcccgcaccgccgccgtcacgctcgtctacgagctggcggacggcgaggcgcctccctccgcctcgcgcccggcccagcagcagcagccgcagcaacagacgtcatcggcgtcgccgtctcaaagggaggtgcggttcgcgcgcctcatctcggagaagggggtgggcacgtaccgcatcgacgcgcgcgacgtcagcgccgagacgtaccaggcgcagctcaaggagatcggcatcctggtcaaggcgcgcaacttcctcgtcttccagggggacgtcgagagcatcgccagcaagagcccggccgagctcaccaagctcttcgagcagatctccatgtcggacgagctcaaggccgagtacgagcagctgctggaggagaagaacgcggccgaggagaacaccatcttcgcctacaagaggaagaaggggctcgtggccgagaagaggctggtgggtgctggattgggaggcttttattttattttatcttgtttttactgacgtttttaattttgttattgtttgtggggtgactgcaggtgagagagcagaaggaggaggcggagcagttccggcagaagctggaggaagtggtgggtggagatggaggaaggtggagttttgggggaagaaaactgtggctgatcattgttgtttttggtagaatacgttgcgcgtggagcactacttgtggcagcttttccaggtacaagatgatatcaagcagcgcgaagagacggtgaggcactaccagaaagctggcgtcacgtgcgcgacgaaggaggactcggttgcgcaggtgtaccatgagaagaagaaggagctgagtgctatactgcgagaagtcaaggccaatcgggagcggatccaggatttccaaagcgagatggaggacattcagccgcagctgatcaagctgcgagaggagacgagatactcgcagaagaagattgtggaggcgcaaacgaccgaaaagacaatgaagagccggctggatgggaagtcgacggaagtggacgccttggaaaacgatttgaaggagctggagcgagtgaaggcagaactggatgcgactcagagtcgtcgtgctagccaaggaggagacggcgctgcgctagttctgaagggcgcgcgcttggaggagtaccatcggattaaggaggacgtgcaggtcaagaccaacttgctgcgcaacgaactggagtcgattctgcggcagcaaaccacagaccaaaacaaagtgcagacactttctcaagaccgccaggagaatctcaagatggtggagattttgacggaggacttgaagcaagccgatgaacgcatcgtcagcatgcaacgcgtcatctcccaaacggagcaagacatcgcagaggctgagaagaacatacagaacgccaacgaggagaatcgaggccaggctcagaagaaggaaaaactttcgcagcagttggaccgagtcacgaacaagttgcgcgacttgaaagacgacaagcggcagtcacaggcagaagcgcgcagggcagagacactggagacgctgaaaagactgtaccctggcgttcgtggccgccttgtagatctgtgcaagccgatccaacgcaagtataacatggccgtgaccgtggcgactggaaagcacatggatgcaattgtggtgacagactacaggacaggccaagactgcattcagtacctccgtgagtcccgtgcgggtagcgcgcagtttattcctttggacaagatccgtgtgaagcctatcaatgagcgctttcgtggcctgggtaacaacatcaagatggtcgtcgacgtgattgaatgcgacgcggagattgagccggcactgcactatgcagttggtgatactgttgtatgtgactccatcgatatcgcccgcgatctttgcttccgtcagaacgagaaggtgaaagctgtgacattggacggaatggtggtgagcaagaacggcagtatgacaggtggcaagacccaaaatgacgtgcgtcgggctggccggtgggatgaaaaggaggtggaggccttgcagcaacaaaaagatgatcttatcgatacaatccgcgcaatggcgcggcatggtgcttcgtacgcaaagttgcaatcgttacggacgcaagtggaggggttgaggagccgactcagtcatgctaaagctgacttggtgatcactgaaacaaagcgaccaaagattcaagcgcgaattgatgaagccaaaaagcgaatgactaatatcatcgagcctgagcttcagaaatacgaagcggcagttagctctcgtaagggtagcattgcagcgttgcaggagcaaatcaacggggtagaggatgaaatgtttgcagatttcagcgaggcagtgggtgtcgagagcattcgagtctatgaagagaaggtattgaagcgacaccacaaggcaatagagacgcggcgcaaaatcacggagcacgaggccaaacttcgagcgcaggtgagaatcgggcggtgcactgtagtccgtctattgaggatctaacacagtatcgttgtattgctttggcccacccagatcgagtacttgcagtcgcaggatttcaaccagcccatgctcgacgcaagggagagggcgacgcgggaagctgaacacctgaagcaattagctgaagaggaagccggcttgatgaaacgagtggcaacattgcagaaggaaagaaaggaacaagatgggctacgcaagaacttgtcagcaaaggtggaggagcttgagaaggaacttcgtgaaatcggcagcaagaagggcaagtacgaagaacggaagggcaaaatccaaagaagaattgcttcggaggagaccgtactggagcgcctgaaggatcacaaggctgagatttttaagcgcgcatcattggatcaggttacactgccaactattgctcatcaatcctcaaacggcactgaagatgttgagatggaagacgttagtgcgaccggtgtgccgtcaaacacaagcacttcaactgaacaagacagcatcgggggctcagatctactggtgggaggtgacgcagcgaaccaagaagtggatttttcggcgcttcctgatgcgcatgtggtggtggatgataaggagttcgatgagatcaacaccaaatacgaaaagcgaatcggtgtactgctcactgagctggagcgtatgcaaccgaacatgcgcgcactggacaagtttgacgtgatccagaaccggattgggaaagaggaggaggaactggatcgtatcaagcagaagtcgtttgaaactgcgaccaagttcgaggaggtcaagcaagctcgcttcgatcgcttcatggaggcgttcaaccacatttccggagtgatcgactcgacgtacaagcagcttacgaagagctccaagcaccctctggggggcacggcgtatatgaacctggagaacgccgaggagccctacctgaacgggatgaagtataacgcgatgcccccgatgaagcgcttccgcgagatggaacaattgtccggtggcgagaagaccgttgctgctctagctctcctcttcgcgatccacaactaccgtccgtccccattcttcgtgctcgacgaagtggacgccgcactggacaacgtgaacgtgaacaaggtatcgacgtacatcgccaactgcgacttccagtgcgtcgtgatctcgctgaaggactcattctacgagaaggcagacgcactcgtcggcatctgcaaggacatcacgctgcaacagtccaagtcgatgacgctggatctcaccaagttcgattaatttgacgtcgctacgggcgctgaaaggggtcaaggactgactgacttattatttttgcatgagctgcataccgcctgcgatgctgtagggatgcagcttttcaatcgatgacgaagttattttattatgtctgaccttcatatggttgttccttacttgggggtactaccttcagcctccttggtgagttttcagtgatgaagactcaggctgacgcgttcaagtttgatagagccatttgccagagtcgcgtcgctcaggaacggtcgttcaagaaaaacaaccgatgaatcgagaatatcggctgcagaatgtttatgcagaacttcttgaggcattcgcgtttcccagcgtcatcaagcttctcggtatcaaatgccgcgccaattttgtcaatcacgatcaacagtgggcccacttcgagcatcaaatacgcgaaaacaaggtaaatgctcgtgcggtcttccagcgacttggggctgagagcacgaggcaacccgccgtacttgagctcgaatacacgacagacgtgcctcacgaaggcagcgacggccttcacaaaattaaactccgactcggcatccaggagatccattggggaaaactgaatgtggatcgtgtggcacttgcttaacgtgcccaggaaactgtcgtccacttgattggggtcagcagcccataattgttgacatcttcggatgtactcggcgccaaaccttgttttcccgatgccaagcacattgtccaccaaagggaccgcccacatttgaccaccaagaccggcgtttgctcgattatagtttctttcgtggaattcccggagctgccccatcgcatgatcagggttcacaaaagccattctgccaccttgtacagaatcgactgtctcctcttctcgccagacccacttcctatcgatatcggctcgctgccgctttgccgggttatcatcagctacttccttcgtttcctcccggcctcttgtgcatgccacggtcacgatgagcgcctcctccatcggttgaccaagcgatccaatctgcaagccgacacccaaaggccccacgctgccgttgaacacctggagggaatttgcagcgacgccagcgaaatgggtactgcggtatttcgcctccagtgcattctgtagatggtgaatcgtcttgtactcggctagtggaaccgatgcttcaccggtgacgtggccatcggttttcattatcttgaaccagacttggggcactttcacgataattggatccatggtatccgctccgtacttctcaaaactgtctttcgcccggttggcgaacactttgaggtctaccacatcaaggtcagctgggaaaaggcctcgtttcgcaagctgatcgcagaagtcaccaacagcagatccagcaggaaccctcagctggtgggagcgactcgtttccccttcgaccacacggaaagccttccacggcgcctgctccatcttcgacttggtcttcaccgctgcagattcgggagtgagcaaaaaccgagaagactctttcgagcgattcgtacttttaaacttttaggcgaattatcaggtcgccggacatcagtcaaatgtatctatctgcagattcctcgtttctcactcgcgaatctgcgccggcgaagagaaatcgatggagtggaagtgtttccgtgtagtcgaaggagcaagtcgccctggaccggtgcactccttaaaggttccagctggggctgtcgttggcgacttctgatgcttttggacggaggcgaaaagaggtttttcaagagtgagaggcaccaatcggggttcaaggtcgtcttcaactcttatcgtgctctagcagcgcttaaagtacacctgagacgacccagcaactagtcgaagtcgcccaagctcattctcaattctcccttcgccaaaccaaccagctccaagtcctcatcgccgcacgaatcatgtctcgaacctcagtgctactcttccccgcggatgtaccaagcgcacagctggatggcccccactacgcagtagtaacggcaagacgtggggtacagtccaagtgaccattctaccccgctcggacgatgaggagagcacctcggccacaatcacgcgtgccgtggccgcggcgagatcagtttcaaggtcggagctcagcacaggccaacccggagtgaaaattttcctcccagtctgctaccgcgttggcgacgtgttcaggcacggtcaaattacggcctacaacagcaccgtgtgcgttgtaagcacggagggagaaacccatgaagtcccgttcagcgcccccacccagattgctccagctgtggccgtactacggtggaatgcggtcttgcttgaggacgtcgcttcgatgtccgatctcgaagcggcccacgcgctaattctggaccgcctactcggacagaacggccaacgggccaccaaagacatttccagactgttagcaggaatcgccactcgccaatccatgcccagaccatcggccatggtgccgtgggtatgtcccagaacgggtcacgagcttctagtcagcgtcgtcgacgtcctcaacttcgccttctacgtagacggcgggcgggccatacccgctaacgtccgcgtcggagcaacgttcctcgacggccctgccacccgccctgcgcaggggtcgcgaaggccaagaagcgaacgccaggtcagcgtaaccgcaaaccatgaggacccgatgcccccagccactactcgacaggaacgaccacgacgaactcaccggactatctccacggcagccgtccgcgccgaaaacccaactgtggtcgatgcgccctcttctggcgaagaagagtcgagcaacgaaggcgctgcggccacgcgatttgcagatctactggacgcgcttagtatcgatcatcccgcgccaaaacgccgacgcacagtgcgcactgagcaggcgccgccgacacccgtaggccacgtaaccacagcccaaggtgattcgcgcgctgaacccgctaccgccgacccggtgcaagcgatattgcacgcgttagctccgtacccgtcggtactggcagcttacgcccaacaactgcaacgattatcggcaccagcgacatctccaagtcaagtgacaggaatgaacccgcctccaatatcgcaagcagttcgactttcaacttccccgtcagacctgatcccagtgaacgaaccaagtgatcgacgacagcagaattttcgcccatctcgtgcccaacaagaagtacacgacgccatcttagcaccagcatatataggtaaggacggagacgtttacatggaccatgtacggaccttaacgacaaccaagtttctggctcatccggctatcgcttcccgactgttcgacatcgagttcagcgcgtgcgacttatccatcctgcatttcccacggtttgccctcgacagccaactcgaccgatcaaaggctaaggcggtcaacatgcgcaatttctccagcaaagtggcgttgcccgaattacctgataaacccatgttcagcgacctcaccgaagctctatccgtgctttacacgtttgcaaaagagtttttcaacgaggagacaagagacgtcttcgtggccgctaaagatttcggggaacaactggaggattttgccccgtggagctcgtccgaagtccacattctcgcgttctggttctccaacatcatcggagcatatcgccttgcggttgttgaagacatgcgatcggggtctagcacgcgccattcggtccgtttccaattaacgatgcaagaccccgagctggccggattactgttcaaggcctcacgtgcacgcgcgaaccaagcgtccgggactaatggcccatcacctacccgggacagcacccgagcggttcacaaaggaggaaacgacgctgtggctcggcaaggagttaagcgtagggaccgtaaggtacctcaggaaatctcggcccaagttccaaagaaagacggacgccagctctgcctccggtatgcttctgtacaagggtgttcgtccaagagcaaggaccggtgcctgcagagctttttagcacactttgagccggccgaactaccagaagccgtagcggcgtacatacgggacacctacggcggcgttcggaccttcgcgaagcaggaatgaagcctgcgagtgccctcgacacttgccgcacacccaggggtgggatcgcggtctgcggtatcaagagtaatcgagctcctagaacagtgcctacaagcgtcagaaaaaacgcgcaagcaatcgctattcgcagcctttgaagcagcagacgtcgaaccaccacacggcataccagcggcgaatgacaccgggtcacgaccaacgttctcgctcgatcacgacatggtacgagccatttcgcttctcgtgacgcgcacgaatatgaccctcgctgaaacgattcgtctctggcgaggccagtccgcgtcatcgcccacaccaaataaagcgctggtccacgatcacttcccgtggctacttcgcacgtgaacctgctcatacgtacagccacacagggtgtgaagcacgtctttcaagttgatggcactcaacaaacctgccccgtaccaaaccacaagtctgcggcagtcatgcgcaacgcgctaatcagaagcatccgagatggacagagaagcggtgcatacctcgttgtatcgcgagtcgcggcatcgcggtggcgcctgcattacagtccatttggttgtgtcgagaaggccgacaccgatccaatagtcgaaacgagagtaattcacgatttatcgtttccgctgggccactcaacaaatgcttggtccgaccaacacagcatacccacgctcgtgtacgaacttgtcgatatcatcgcgcacagaatcatcgcactacggaaagccaacccaacgctgataatcaagattatgaaaggcaatgtgaaatctgcgtacaaaaacctacacgttcacgaagatgttagcgcctctcgttacctgacgaagatgtcacgatcatcgatctcgcactacctttcggctggacaggctccgcagcccactatgatgtgtttggaaaagcaatatctcaccttgtgcgtcgcgagagcccgaacacactcgatccgaccaatcctgacactaccccgttcttttgtttcgactgggtagacgatcacgtgttggtggagtacgagacccatgatcgcctctaagcctgtgacagcgcgcttcggctagccatgacggcggtgctaggcccaagagctatcaacaacaagaagttcaccgagtggtcgacgaacatagtggccctgggtctggaatgggactccgtcgctatgacggtatcaatgcccgtatccaaacttcaaaaagctctggggagagtcgaagctgttctagtctcatctcagacgacgcggactgcgctagcgaagctactgggaagtctacggcatatctgctcctgcatccgcccggctaaaccgttgttccaacagttagtggcactatggaaacgctcaccaagggtacgaccgattagcctcactctagaagcacgtctcgatctcgcctggttcgcccatattcttcgatttggagtctacgcggggtacctctcgagtatttttgtggattacctgctccggcggtacacttgtacatggatgctagcgatagcggactgtgcgttctgaatcccgtacgacacgaattaatccgcctacaatttgaccccgtcgagcaagacctcatcaagcaacgtcgtcggctgagtataaacgtacgtgaacaattcagcgcactagtagcagtactgtgctggagcaagcactggcgatcctcgagccgcaccacattgacacacgtacgattctggatagacaacaacgccgcagtgacgtggtgcaacaagctaaccagcacgaatccgttatcacaagagatgaaccgaatttttggagcagttgaagccgaagggagcatacgggtatcagccgaacatcttgccggatcatccaatttcctagccgacctgggatcccgcgcatggtccgacccgcaacttacactctggaacaaactaaccaatgattggatgcaggtcaaagtgcccgacagcatgaggaaggcttacgacggcagctggtcgcccttcaacaacgctcccttgccgatactgttggagatcgcaagagctggcgccacctgcgatgagtgcagtggcgacgataacggcctggaacgaccacaacgacccctccagctacacaacacgaaactaccgatgcatattagcctagcacagacatcctagcatcatccaacctaactcattctgcaatacaccaggtgcgaggcaccactacaaggagcgacccgtgcaggatcaacgagtgctcccttcaggatatgagcccaactggctcaccttctgcagcgaccagtgaagacttcgaagactcgcgaggcgaccacgaagaccttgaagaatactcggaggtacgaggtgctaacgaggctgacgaagaccaccaagacggaaggaatactcgcctaggactgccagacgacctgcactttgacccttcggaccaagagacaatggagcagcacgaccacctccagctcatccttcgacggcagtcccgagctggcagaactgaagaagcagctcgcgacgcgagcgccccgttccccctccatgtcggatactagcatggaaactgcacctccatcaccgaagaagcctaaaatcaaggacgtacgctgctcgaacttcaagggaaacgaggtttaccctgggttaggagctggcttcgagaatttcatccacgagttcgagcatgctataaggacggaggagctcgtgaacggatccacctggaccgacgacatcaaggcatcggtgattgtcaacttcctcgaggggaaagcgtctaggtactatcacaagaagaactcagagtggctgcgccgtcataatggtgacagcatgccgtactcagatgtgaagcgcgcgatgcgtgcagagtttggctgtaaactaagccaactcgaactgagcacgaagatgcagtataacaagcgtgaaggcgatacgtggcatgactacctggaatacttgaacttcatcgagagcctcatggaaggtgatcagaccaagatggtcatggaggtgttcggaaacaatgcatgccccgagttagcgcccacgctgttgtcttcagtgcccgacgacgcaagcgattacgttgcggaaaccgatcgcatgaagcgactgctatacaagctgaaaggtgacgggcgcagatgtggtgcgaagcgagatgaacgcaaaaaccgtcatgctgaccgctggaaaccgaattcacatggccaccgcagcggaaatcgccacaatgatgatcagcattggcgtaaccagcgaaacaacaacgacaactcggatcgacgtccgcagcagcaaaataacggccaagcctttgccgccgctggtcatcgtggtgaaatacattgccatgtgtgcgggaagcctggtcacaagattttcacgtgtccactcgtggaacaggcaaaacaactagccactagaggaagtgcgaacgtagccgctgctgatgatgacgacacatctagagattctgatgatgaaggctatgtctgggtcgctgccgacggtgccgagcgcggcgcttctgccacgagaggaaatgtttggacagtggattcgggagcaactcaccacctttgcatcgaccgtgaccaacttttcgcaatagagccagcattcctgtcggtgcaagtggcgaatggagatcttgtcgccgctactgagaagggaaagactgtcatcacgacgatggcagaaggagtgcctcgtactgtcctgctagaaaacgtgtactgcgcaaaaggtattgaccgcaacctgatttcagtggctcaactcaccgctcgaggctacacctgaaccattggtgaggagcagtgtacaattacgaacaagacgggcaagattgttgccgaagtgggtaattcagcctcgactgggctttggtctgttggaatcgagcaaggcgcggcctctttcgcagcaatgacgacctctacgcttcagcagtggcatgaacgcctggggcacgtgaactaccaggatctggtacgcatgattgacaaaaacctcgttgaaggcctggttgcctctaatcggaaggtggatttctgcatgaactgcgctgaagcgaaacaagctcgacgcgcgaagaacaagcaggatacttctacatctgccccaacggacgaaccgggcgctaccttgtgcgttgacctgaagacggacatgaccccggatcggctcggtcacaaacacattttgaccattgtagaccacgctacgaactacaatcgcgtctacttgctccgcagaaagagcgacgcggaagggcatttggaggactttgttagcgaatttgagcgacaatacgacaccaaggtgaagatgattcgctcagacggtggtggtgaatttggcagcaccagactcggccgcttcctccgcaaccggggtattctccaccaagaaacggaggcgggcatgtcatcatcaaacggaaaagcagagcgttttcaccggactgtcatggattccgcccgagcgatgctctgggcctcggcattgccacagcgattttggggcgatgctgttctgtatgcgagctacattcgcaactatctgccgactcgagcgaacgccgaccatgcgtctcccattgaggccctctccggaaaacgacccagtgtctcgcacatcctcgaattcggctcgaagtgtacgagccacatcgctcatgcaacgaagcgatcagcgaaaaagcgcgctgaaagaggagttgttattggcatcgacttcaagaagaaagcgtaccgtgttctcatcccgcgaaccaaacgtgttatttctacaacacacatccggaacgttgaccgtctggactcgcgagctgtggggcgatacatggatgccatcgacgcagacaatagcggcgaggaggaggatgctggcgatcaacagtacgaaaccaacaccccacatgacgctaatggtgaggaagcacgggctggtagccctgcagagcagcatcaacttacgtcgcgtgccatccagcgcatctttggcctgaatcgaggtacacgagcactaccacgcgatgactttcggctgccccaatcttttctcgaagagttcgccaatccggcatctgtcctgctcactatcgtactcatggagggtactgcctttgcggtaccactagagcgtgacgggatcaaggagccagtaactgtggaggaggcaatgaacagcccgtattggcaggagtggtggcaggcaatcgaagaagagcttcgagcaatatcgaagaacgctacctgggaaattgtggacattcctactgatggaaatctgataagtgcaaaatgggtgttcaagctcaagtttgacaacaaaggcgaattggaacggttcaaagcgcggctggtagcgcgcggcttcactcaaaagtttggcattgacttcgcagagacctttgcgcccgtgctcaagatcgcgagcctgcggttcattgtggccctcgcatctcagtggcatgccgtcattcgacaaggagatgttcctaacgcatacctgcgagcagacctcgatcgacccatctacatgcgcgcccctgtcggactccaattacccaagggcaaatgcctactgctgcgaaagagtctctacggccttaaacagagcggcaagttgtggaatgacactatacaccgctacttactggaacttggcttcaggaggagccaactcgacccgtgcttgtattttcgttggcatgaaggcaagctaactgtactgggcctctacgtcgatgatgtggtggtcgtcagccagcgtgagggcgattccgactggacgatgcagaagctcgccgaccaatttcagatcaaggatatgggtccagccaagaagtgcttgggaattaacattgagcagagcgactgcggcatcaacctccaccagacagccaatattgatggtttgctggcaaagtgcggcatggagaatagccgccccgtgactacgccgatggagtcaactcgggacctgaacggagaggacagcgagcccttctacgacactagcatcatgcgggagaccattgggtcactactttggattagcaactgcactcgaccagacatcacgatgcctgtgaacttcctggcgcgtttcgtctcaacgcctacgtcgactcattggactgcagtcaaacgtatcctgcgctacttgcgcggctcgcacgagttgaggttgcactttccccggccgcaggcaccccgacacactattgaggcagccatcttccgcgatgcagattgggccgggggcaaggacgcaaagtcgacttcaggaggactgctcaccatcaacgccatgcccatttcgtggtacagcaagaaacaatctacggtcgccctctctacagccgaggctgagtacatcgctggggcgacggcagtgcaggactgcttgtgggtgaagcagctcctgaatgaacttgagctgcacggcaaagatgataatatcgacttgtacatcgacaaccagagcgcgatcaagaacatggagaacgacgtgacgactgcacgcatgaagcacatcaacataaaattccacttcatacgcgacgccattcgcaagaaggaggtcagcgtgacctattgccctacgactgagatgaaaaccgacattttcacgaagcccctcggcgcaaccctacacgggcgcaacctggccataatcaagcttatcaacccacacaacgagaagctgtagactcggatcatcttggtcgaggaggactgttggagatcgcaagagctggcgccacctgcgatgagtgcagtggcgacgataacggcctgcgatgaccacaacgacccctccagctacacaacacgaaactaccgatgcatattagcctagcacagacatcctagcatcatccaacctaactcattctgcaatacaccaggtgcgaggcaccactacaaggagcgacccgtgcaggatcaacgagtgctcccttcagatacgtcccgacgacaatacgactcgacatggaagcaatgggtctccttcagtcggcgcatcggacgatctccctggctaccagagcacgatcaagtcgcgcggtctctgcaactggtgcttttttgccatcggctacatgctcagacggacgagtcggatctacctcctccgtgcacgcccaagttagccatgtcaaatggcatcataaagtctatgccgggttcgaacccgtcatcagccccagccacgccacagcgttcgcaggaatgcgacgcatcagccctcctcctcgaccccgatctcccgtcactcgtacaatgctcgactggatgtccgcccaaatcgactacacgaaacccaagcaacgcctatttcttggggctgcgctgctgggtttcttctatctcctaagatgttccgaatatctggcgatcaaagggagaaggcaccggtacgcgctagaggtccgcgacgtcgaagtacttgacatcacaggcaatcctgcggtcaacttcgatgacgcggttcatgcggtaataacactccgcggaagcaagaccgatcagcgaggcgaaggatcggcacgctacttatcacgatccggacatggcagggtctgtccggtaatcggaacctcactgctgctggaactagccggtcgacaccatctaaggccgaccgacccgatatgttcgttcagcaagtcccgaatgctcaaggcagaataaatgtccaaagccctgaaagcggctgcaatcggcaccggaatcgacccgcatcgaatatcctgtcactcggcggggcctctgcgctaatagccggtggagcagattcaacaacaattaaacttcacggcaggtggaagtcaagcgtatttcagagttacacacactacacgcaagaactgggagcaccactcgcagcgatgatggcaggcaacggcgacttggcatttcgcaatacgagcaccactcgtcgcaatggggttcacgcctaaggcgtgccaacgcgcggctgcttcgtaatctcttaatgtcaagtcttactttgatccccacatcatgcagcacgcccatcctattctatgccgatgccacgaccgaaaatgcaaggtgcttgcggctcgcaaacacctttttttagttagcattgacgcctcagctctcatagtgttcccgaacagtaaggcgatggaggaggggcggtctctgagggcgagagtaagaatgagtgacttcggaggcgacgcaaacgaccccctcatcgtgaaagagcccaaggtctggttccagcttacggaacccgacagccgcactccgtttaatgacaccactgctgcgtccgtcttgttggtcgaggagaacacagtggaagatctacgggatgctataagaaagaaataccaggacaacctcctcgtcggcatcgccgcgtccgccctcaaagtgtacagcgacgacagtcccgagcctttgagaaggtcggcgcagattaagtcgcgtggtcaaacgctgaagaaggcgctcgtcgtggctgtaccgatgccaaagcgaacgagagcgcgggacggattaaatgaaaaatggcgaatgtccggcaaagcggcaccgacccgatgatatcgtggagtcagagtggaagtggaaagaggaggaggaacgagtctatgccgtgaagaactgctgcctgttttacgtggagcgtgagcatgccacgcaacagcttcagaaatttcacaagaataactactccctggccgcgctggggcatgatcaagactgggtcatccctctcgtggataacgtgtggggcttcgggaaatcacggtttggctccgagtacattcggagctgtcaaaaaaccagggaggctgaccccgacaaagcaaaggatgcttgcctagatactttgcgcaagtgccacacgatcaatatcgagttgttttggaaagacctggtggttggtaaagagttgaggattgacggtggtaaagctcgcaaggccttcgtggaccgcatctgctgggaatttgaggacatgtacgacagattatctcgtgctctcactcccctggcgcagcaagactattcgagccacgtgtttgttctaagccgtttgatccatgaagatggtcctctgttcatcgtgcttgatcagatcaatagggccttcgattgcgacggccttgatgacgatatgaagcgagtgcaattcctggagttctgtgaccaggttctggtgcattttttttcgatcaggaatttgtttttcctcgtttctgggcgcgcatcattcctgagctcggtatcatcggccgcgcgttatcgtgtgggtcgttcattgctatttgaacggctgagctttaacctcttccgaccacctaccatcgaggagattgtagtagtgcggcctgtcacgtggccgacagacggcggcagccgcgcactcgagtcgtcatcgacttgacgaacgagtgacgaagaggacgatcagccagtcggggcgcgaagtgtggcagcggcagttggatggtggcggaggtgagccagtgggctggagacaccggctacgggcggtatcctacaacttcaaggccagacttcggccatgcaaaagatcgcaggagggcggacacggagaagagtgaaggacaagtagtatgcagagaggagaggcgacgacagagcgaatggcgttcggctgagagacagcgagagcagataggttaggaagggccctctcgtaggttgaggataggaggtctcgtaggtgggggcaacgagcgcgcggctggccgctcgaccctcagttaagattgttcccggttggtgagcagttaagactaaatacagcaagagagtggcgccgtacacgggttccagtaaaactaaggtgaggcagagattaggacgattggtgcacgatgagggcgtaacacagtagggtggtggggactaccacaggggtcgtggcaggaagtgcgaagcctgccatgatcgtaagggcgaaggcgttcgctcgccgcactcgggcttgagctcctgaactcgaagtagatagagaaatacggattacctgtgggacacagcccaaagaccctatccgggggtgacggtcgccgataatgtgtcctccccaccgttcctatccgaaggacgtctggtccgacggccagtagctgtctggtagtgttgacgtgtctgcctcgcactttgatctctctcgctacgtccaccgggctacctaggtggacgcactactctctccctggctgctgaaccagccgacgtgcaatggaattggcgtggtggttcgggaactagctacaagatcatcaagagaacgtattgggataggcagaaagtggggactatccaggaacactacggactcgacgaagacaaggtgaaggaggtagcagatcgtcttttcaagacaacctttacgctgccacgagagatactggcggcattcggaaagtgtgtttcctatggtgagcttctcgactatgaagcactcaatcagccgtgggacgggcatgattggcaggcttttgacaagcgcttgctaaagtttgggagtccgcttcgatctatcatggattgtgtggtcaaaggcgaagaaatcgacctatcaactcggtgggaagacgaggaaggcaaagtcgtcacgtacgacatcatcacggtcatggttggtatcgtgtgggaagggaaagtaacgagcgcaaagttacgtatcccacagcatgtccagtacgcgatcctaaggtctttctactcattccgagagttggtggcggaagttgtccctgctctcagtaaaggtttgatagtcgacccgattgatccgttcgagctgctttgcatgaagcgcttcatggatttattccacgaggaaaaacttccgagcaacgcactgaccggttattttactgagacacagaaggttgggcgctgcactggcgtgaagttcgccaagaactcgggttacatgccgaagatattgctgaaagcgaagagatcacgttcatggtactcggtcatcacggacgaatatgtactgcgcgagttgatgaaggagatggacggctttgtgctcaagggtggccaattgagtctcaagccgttggcggggtcgtcatctcccgaaatcatacttatgacagcgttgtcgcggcacgatactaatggtgggcctactcgttcgaaatggtgttaactgcagtgaagtcagcgaaactacagtgcgtattgagtgcgagaagtttagccggatgtgcatgcagttgcccacgtcctcgcaaccccgactgaacgtcctcgtcgtgtgtgcgacggcttataatggcgaactgcgagccaagtttgacccgagctgcaaatccgccgtgttttcaattgaaaacctcccggataaggttcgcgctggcattgatgaggccattgtgctggatctgtgcacacccaaaaaccgcgacgagtttttcgggcccgctgatgaagttgagctcaaaacgacgctggagggggtggttgcgaaactctcggtaggttttgttcaggttggaaacgaatagctcaaacgaatacgaacaacttctgcgaaagatagtggaaaagcgttatcttctggtctcagcttaaatctataatgaagtttccttagcgcagttaaagacatccattccagatctgtttgttctgctactcttcaggctctttcacagcgccaaagcgcgccttggacgcgtactccgcttccttctgcagcaactccttcagcctgtgatctgctgctgcttgcgccctcgaaaacttaccctagcactgctgatcgagccatctgccagagtcgcattgctcaggaacggggcactgccagcaatcaagaaaaacagcctatggatcgagaatatcggcttcagaatgtttatgcagaacttcctgaggcatttgcgtttcccaacgtcatcaagcttgtcatcgccaaatgccgcgccaatgtcgtcaattaagatcaacagtgggcccacttcgtccgtcaaatacgcgaaaacaaggtcaaggctcgtgcggtcttccagcgacttggggctgagagcacgaggcaacccgccgtacttgagctcgaatacacgacagacgtgcctcacgaaggcagcgacggccttcacaaaattaaactccgactcggcatccaggagatccgttggggaaaactgaatgtggatcgtgtggcacttgcttaacgtgcccaggaaactgtcgtccacttgattggggtcagcagcccacaattgtcgacatctccgaatgtactcggcgccaaaccttgttttcccgatgccaaacgcattgtccaccaaagggaccgcccaatctgtaccaacgagaccgttcttcgcacgattatagttgcttttgtgaaatccccgaagctgctccattgcacgttcgcagttcacgaaacccattgcaccaccttgtacagaatcgactgctggcttgtcttctcgccagacccacttcctatcgacacgaatggtgggcctactcgttcaaaatgatgccgcccccggtgaactcagcgaaactacattgccagttgcccacacccgactaaacaccctcatcgtgtgtgtggcggcctatgggtagtaatagtagtcaggctgcaatcgagtagtgtgggtttgaccccgagttcaaaggaaacctagggctctgcagacagtggaaagcggcattatcttctgactaccgctcggcttagtctaaaccctttcgggtttcttttgcggcgagtggatgccaaccttactttatggtcaagaacggatcagttcagctagtcttcaggctctttcacagcgccaaagcgcgccttggacgcgtactctgcctccttctgcaccaactccttcaagcggtgatcggcggcagcttgcgccctcgaaaacttgccgtagcgctgctcctcgtagagcaaaaagcactctgcgagacgaatcttggacgggaggtcgacggtcacctggctgagcgcgaacgacgccgagtccagcagcacggacaaatcctcttcttggggcatttcgatggcccagaacacgcgcatgctgttgtccagacccccgatcgtcgagaacgggtttcgccgaggcaagcgcactccgtccatcgcagaggtggcgagctggctcttgctaacgaagtcgaggtcgcacgtcatcttgagcacgtagttgaggtctcgccacaggaacgggcggatctggatcatgcgtcgtcgccacccagcgaccgcatccacagtcgctagcgagagctctcgaacacgaatgagcgcctcaagcagctcaacactctggtcgtcctcgaacgcgcagcagcagcgcagcaactcttccagcccagcttctcgagccacgatggctctcaacacggccagctcctcctccgacagcagcccctcgtacgacaacgccttcgtgctggagaacctcaccactgagctggaagtctgcagtccaccttccttcggcttcttcaccccagtcatgtacggcttcagatgatcatcggccttgggcttctcgctgctagcggtcgccgactgcatcctgctcgccctagacacacacacactaacaaatcactgaacagtcgggctcgatccaaatccagctgcaccacaatgccctcgtcaaaggttctgcttcacgacatttcccttggttttgcttgtttcccagttgcacttgctatggtaggtccattgctcacttccgctgctcggcagcgcgacgtcggatctcttcccaggtcgtgggcttagccacaggttcactgggcactccaaagaaatagtcgtcttcgtcgtggcggagcggcggcagatttttatccgacccaggacggctggagtcccgcgagtagtgagcgtacgggtcacgagagacaagggcgtcacggtctccgaagtccgacgcttcctcagccggaggaggcttcgcgccgaagaaaaacggtgagcgaactccactgtcattgggctctccgaaagccacttggtcgtcattcttccagtccttggcgtcttttttgccgcgcggtgtgtcaagaccagtgatcggcgggatgctgctgctgctggagatgtcgttgtcaaagcggcgaggcgcgggggggagcttgttcgtcggcttcgacgcgaagcttcccggctccgcaacctcctcgttccacgagtcactgcagcagaacacagcggacaaatacgtcagcaccaagagaaagaattcaatcaacggacagcatcaagactcagcaaaccaagaagtggatttttcagcgcttcctgatgcgcatgtggtcgtggatggtaaggagttcgatgagatcaaaaccagatacgaaaggcaaatcggtgtgctgctcactgagctggagcgtatgaaaccaaacatgcgcgcgttggacaagttcgacgtgattcagaaccggattgggaaagagaaggaggaactggatcgtatcaagcagaactcgtttgaaactgcgtcaaagttcgaggaggtcaagcaagcccgctatgaggcgtttagccacgattccggagtgatcgaccctcttcctgaatggttttgaagaagagtgctcaagtactcgtcaacgagaagaccgctactgcaccaaaatcaacttttttttcgttgtaggattaactcaagttcacctgccgcacctggggaccttgatccagacggaacgtttggctcaacgctcaagagcacacacggccctatcgactcggcaaactcgcactattggatcctggtcgtggtgctctccatcgcggttttagtaatgacgccctccaacgcgtcgacaagatgcttctccccgtcgatcccgaagaactcggcccgatttttctttgtggtcaaatccaggattatgacctcgttgatgccctccttctcctccctctcgaagccgtccatcgaataccgcgcgcacttggaccccaacggtgccgatgggttaaacagtttttgtagggtcttgtcgtaagacgtcgcacacacaatgagcaccttcagcgaggtcgcggagttcggatactgagtgcacagccgactaaacttcttgcactcctcccgcacgattttgccattgaccttgctggacaacgtataattcttaacggcaagacccagcagtaatggcgttcccgccgtcgagatcagcaggacgtctggcgatgatgacctcggaagcggcttcaggaccaaccccccattttcgagcgcgaagtcataaatctctgtcagcaaaggccccgctttctcctttttcgcagtggctgaggccatcgaagccggatccttgccattcgatgcaaacttcggcaaaaagtatgaaccccttgggaactcgacgtccgcgttcccaaacagctgctccttcaaaaagaaactgcgaagcttgtcacaaggtcggatcttcgtagaaaacaactcctggaagcgcgccaggcaaaagtactcgaactggtccggatggtcgattgccacttcgccgagtaccgttgcaacaatctcaagcatctttctgaaagggtagaaggcgatcgatatcgcgtactggatgtactgcggtatgtatatcttcgcctgcctcgattcgccttcccacgcaataccgaaaatgttggtgatgatatcgtacgtgatatctctgccgccctggtctctccacgtctttgacaagttgaaatattttccttgtccttgttcttcgcgcacatgcctcatgagttcccgaagtggtatctcaaacttccacaagcgctcacgaaaatgctgccaattgaccccgtccaggagcggacttgttgggttgaagttttcaagctcatcagcggtatcacactttttgaaggcctccagcagcgatcgcgggtggccgaacgtagtttggaagagacgggcggctatcttcgtcacttggtcgtcgtttagtccatagtaatccttgatggtcttctttttctcgtcgtcccaattcgtctccttgatgattttttcaatagcgggtggccgaagaagattaaggctgagcctttgaaactcgaatgtgctgcttgtcatttcaacgcctgcggttggtctcaaaccgacgtagctcaggaacgatgcgcgaccagcaatcaagaaaaataacttatggttaggaaataacggccaaaggatctttgtgcagaattccatgaagcgttctcgtttggcaatgtcaccaagattgtcggcattaaatgccgcgccaatttcgtcgatcacgatgaacagtggtccaacttctttcgtcaaactcgcgaaaacaaggtaaaggctcggattgtctttgagcgactgggggctgagagcacgaggcaacccgccgtacttctgctcgaacacaccacggacgagctgcacgaaagtagcgtcggccttagcagttttaaacgtcaacttgctatccaggaggtccattggggaaaactgaatctggatcgtgtggcactcggtcaacgtgtccaggaaactgtctttccctcgtttggggtgagcagcccacatttgtttgcatctccgaatgtactcctgaccaaaggttgatttcccgaggccgaacacgttgtccaccagagggaccacccatagaggacctcctttcaccacagcccgattgtagttggttctgtgaaatgccagaagctgctccgtcgcatgctcacggttcacgaaagccattctgccacctagcacagaatagacaggctcctcttctcgccacacccactccgtcacgccagcggttctgtgtcgcttcgctggactctcatcagcttcctccttcgtttcctcccgccctcttgtccgaggagctggcacagtcacgatgagcgcctccttcatcttttggccaagcgaatcaatctgcgagtcgccgtccagctccacatcaccgttgaacacgtggagttcatttgcagcgaagccatcgagatgtgttctgccatacttgtttaccagtgcattccgtagatgctccactgtgttctctttgaccagagggagcgaagcagcagccgtgccagcgaacggagtgctgcgatcggtcttcgttagcttgaaccagacctggggcactttcacgataatggggtcctcggcatccactccgtacgtgtccaaactgtcccccgccagcagaggcctcccctccttctcctccttgcggttggcgaacactttgaggaccgccccatcaatgccatctgggaaaaggtatgcgagtcccgcgatgtccttgcacacttggccaacaacctttccagcaggaacttccagatcgagcgggcgactagaccccccttcgaccagaaggaaagccttccacggcgccgcttgcgcctccatcgtcatcgacttcgagtgggcgagaaaaatctttcgctcctcttaagtgcgaatattaacagccacccaaatgctgttctggtcgtcgtaagcatgggaattttggctattagtgctattgatactaatactcaacttggaacagttatcactggcaaactgaaaatataactctggcgacggacactgatatgtgtactatcacgacattggctttcagaggagaagtaggagagggagaagaagatgtagcgggtagtcagtaggatttcacatgcgaagcctaacaaaacgagttgtgaatcacacgctctatgctgctatcgatcgtctcgtgcataagccgagggcttctgtatccactgggcatatctagtataacttcactcagcactcagctcaaagcctgttttggtgagttcatcatgcccccggtgtcttgtcccccgccagacaagaataaactaatgaactaagagttgcgccgaatttctgctatggactcttcttcgtggctccacgggtgcgccatgaacgctacgaggcgaagcagtaagccgacggtgtacctgcaggcaacacttctcgtgaatatcagtatccgtcgccagagtcatattatcagtttaccagtgatactgtagaaataccagccagttcagcaaccagctttgcaaccgtcatctcattggttaaaaatggagtaccaggtaatgtgtcactttgctgcagccctttgaggttgctttatgagcaacgcgctgtgaaatgagctgaataactcttgtgcatgtagtactgactgcgagaacctctttgtaatacactagcgtcgctctcgtaggtgcagtaccgaccgcgataactggtcacggcagtgtactccttaaacgccttaacgttcttcgacagagcggcaacagcccacgcgtgcaggcagtactgctgcggggtccttccataccgattttatgagtctgtagccgcgggacggcttccatttcacgcagattgctactgtgcggtaggtctggcgggctggtttttatttgtgtgaagttgtctgaaatgatgacacagtttacctgcgttctctcatctcagtgagagctgaaaagagtgtgcctctgatcctacctagtagccgctggagctttccatggctggtcgaaccagctcatactgtcgtacctgcacgtagtaggaggtcacgtcggagccgaaggcctgttatggcggcggggctaccggtagagctagctccgcaccctcctggtgctgctgcacaacccgtacgatttcatgcaggctacctctaccacttcctcatctagccgccgtaggcggtgccacggcttgccacggtgataaaagctttgcagccctgcataaacgaattcacttgcgttttgtatactgtctcccatacggcgtcgttttgctaccgtgacttgcagtttgtataggagttgagttgcaaaacagactaatacttgctaccgtgtgcgcaaccgaagttgcaagcgataccgtaccatttggctacagtacaaggctcgaaaaggatccacggctgcagcaagagccaatggctgttaatattcgcacttaagaggagcgaaagatttttctcgcccactcgaagtcgatgacgatggaggcgcaagtggcgccgtggaaggctttccgtgtggtcgaaggggggtctagtcgcccgctcgatctggaagttcctgctggatctgctgttggtgacatctgcgatcagcttgcgaaacgaggccttttcccagctgaccttgatgtggtagtcctcaaagtgttcgccaaccgcaaggaggagaaggaggggaggcctctgctggcgggggacagtttggacacgtacggagtggatgccgaggaccccattatcgtgaaagtgccccaggtctggttcaagctaacgaagaccgatcgcagcactccgttcgctggcacggctgctgcttcgctccctctggtcaaagagaacacagtggagcatctacggaatgcactggtaaacaagtatggcagaacacatctcgatggcttcgctgcaaatgaactccacgtgttcaacggtgatgtggagctggacggcgactcgcagattgattcgcttggccaaaagatgaaggaggcgctcatcgtgactgtgccagctcctcggacaagagggcgggaggaaacgaaggaggaagctgatgagagtccagcgaagcgacacagaaccgctggcgtgacggagtgggtgtggcgagaagaggagcctgtctattctgtgctaggtggcagaatggctttcgtgaaccgtgagcatgcgacggagcagcttctggcatttcacagaaccaactacaatcgggctgtggtgaaaggaggtcctctatgggtggtccctctggtggacaacgtgttcggcctcgggaaatcaacctttggtcaggagtacattcggagatgcaaacaaatgtgggctgctcaccccaaacgagggaaagacagtttcctggacacgttgaccgagtgccacacgatccagattcagttttccccaatggacctcctggatagcaagttggagtttaatcctgaaaaggccgacaaagctttggtggagcagatcagtgatttcttcgaggataaatacgacagattacccggtgctctcactccccagtcgctgcaaactacttcaggtctggtgccagtcttcaaacgtttgacgaaagaagtgggcccactgttcatcgtgatcgacgaaattggcgcggccttcgacgctgtcaagtctggtgacattgccaaacgagaacgcttcatggaattctgcacaaagatcctttggccgttatttcccaaccataagttatttttcttgattgctggtcgcgcatcgttcctgagctacgtcggtttgagactaaccgcaggcgttgaaatgacaagcagcacattcgagtttcaaaggctcagccttaatcttcttcggccacccgctattgaaaaaatcatcaaggagacgaattgggacgacgagaaaaagaagaccatcaaggattactatggactaaacgacgaccaagtgacgaagatagccgcccgtctcttccaaactacgttcggccacccgcgatcgctgctggaggccttcaaaaagtgtgataccgctgatgagcttgaaaacttcaacccaacaagtccgctcctggacggggtcaattggcagcattttcgtgagcgcttgtggaagtttgagataccacttcgggaactcatgaggcatgtgcgcgaagaacaaggacaaggaaaatatttcaacttgtcaaagacgtggagagaccagggcggcagagatatcacgtacgatatcatcaccaacattttcggtattgcgtgggaaggcgaatcgaggcaggcgaagatatacataccgcagtacatccagtacgcgatatcgatcgccttctaccctttcagaaagatgcttgagattgttgcaacggtactcggcgaagtggcaatcgaccatccggaccagttcgagtacttttgcctggcgcgcttccaggagttgttttctacgaagatccgaccttgtgacaagcttcgcagtttctttttgaaggagcagctgtttgggaacgcggacgtcgagttcccaaggggttcatactttttgccgaagtttgcatcgaatggcaaggatccggcttcgatggcctcagccactgcgaaaaaggagaaagcggggcctttgctgacagagatttatgacttcgcgctcgaaaatggggggttggtcctgaagccgcttccgaggtcatcatcgccagacgtcctgctgatctcgacggcgggaacgccattactgctgggtcttgccgttaagaattatacgttgtccagcaaggtcaatggcaaaatcgtgcgggaggagtgcaagaagtttagtcggctgtgcactcagtatccgaactccgcgacctcgctgaaggtgctcattgtgtgtgcgacgtcttacgacaagaccctacaaaaactgtttaacccatcggcaccgttggggtccaagtgcgcgcggtattcgatggacggtttcgagagggaggagaaggagggcatcaacgaggtcataatcctggatttgaccacaaagaaaaatcgggccgagttcttcgggatcgacggggagaagcatcttgtcgacgcgttggagggcgtcattactaaaaccgcgatggagagcaccacgaccaggatccaatagtgcgagtttgccgagtcgatagggccgtgtgtgctcttgagcgttgagccaaacgttccgtctggatcaaggtccccaggtgcggcaggtgaacttgagttaatcctacaacgaaaaaaaagttgattttggtgcagtagcggtcttctcgttgacgagtacttgagcactcttcttcaaaaccattcaggaagagggtcgatcactccggaatcgtggctaaacgcctcatagcgggcttgcttgacctcctcgaactttgacgcagtttcaaacgagttctgcttgatacgatccagttcctccttctctttcccaatccggttctgaatcacgtcgaacttgtccaacgcgcgcatgtttggtttcatacgctccagctcagtgagcagcacaccgatttgcctttcgtatctggttttgatctcatcgaactccttaccatccacgaccacatgcgcatcaggaagcgctgaaaaatccacttcttggtttgctgagtcttgatgctgtccgttgattgaattctttctcttggtgctgacgtatttgtccgctgtgttctgctgcagtgactcgtggaacgaggaggttgcggagccgggaagcttcgtgtcgaagccgacgaacaagctcccccccgcgcctcgccgctttgacaacgacatctccagcagcagcagcatcccgccgatcactggtcttgacacaccgcgcggcaaaaaagacgccaaggactggaagaatgacgaccaagcggctttcggagagcccaatgacagtggagttcgctcaccatttttcttcggcgcgaagcctcctccggctgaggaagcgtcggacttcggagaccgtgacgcccttgtctctcgtgacccgtacgctcactactcgcgggactccagccgtcctgggtcggataaaaatctgccgccgctccgccacgacgaagacgactatttctttggagtgcccagtgaacctgtggctaagcccacgacctgggaagagatccgacgtcgcgctgccgagcagcggaagtgagcaatggacctaccatagcaagtgcaactgggaaacaagcaaaaccaagggaaatgtcgtgaagcagaacctttgacgagggcattgtggtgcagctggatttggatcgagcccgactgttcagtgatttgttagtgtgtgtgtgtctagggcgagcaggatgcagtcggcgaccgctagcagcgagaagcccaaggccgatgatcatctgaagccgtacatgactggggtgaagaagccgaaggaaggtggactgcagacttccagctcagtggtgaggttctccagcacgaaggcgttgtcgtacgaggggctgctgtcggaggaggagctggccgtgttgagagccatcgtggctcgagaagctgggctggaagagttgctgcgctgctgctgcgcgttcgaggacgaccagagtgttgagctgcttgaggcgctcattcgtgttcgagagctctcgctagcgactgtggatgcggtcgctgggtggcgacgacgcatgatccagatccgcccgttcctgtggcgagacctcaactacgtgctcaagatgacgtgcgacctcgacttcgttagcaagagccagctcgccacctctgcgatggacggagtgcgcttgcctcggcgaaacccgttctcgacgatcgggggtctggacaacagcatgcgcgtgttctgggccatcgaaatgccccaagaagaggatttgtccgtgctgctggactcagcgtcgttcgcgctcagccaggtgaccgtcgacctcccgtccaagattcgtctcgcagagtgctttttgctctacgaggagcagcgctacggcaagttttcgagggcgcaagctgccgccgatcaccgcttgaaggagttggtgcagaaggaggcggagtacgcgtccaaggcgcgctttggcgctgtgaaagagcctgaagactagctgaattgatccgttcttgaccataaagtaaggttggcatccactcgccgcaaaagaaacccgaaagggtttagactaagccgagcggtagtcagaagataatgccgctttccactgtctgcagagccctaggtttcctttgaactcggggtcaaacccacactactcgattgcagcctgactactattactacccataggccgccacacacacgatgagggtgtttagtcgggtgtgggcaactggcaatgtagtttcgctgagttcaccgggggcggcatcattttgaacgagtaggcccaccattcgtgtcgtgccgctcgtcgttgctgtcgtgagtatgctatcgagagacgacgatcccttcagcgccttgaattcctcagcatggagcaccacgagcttcacctcccgcattattatcgtgttttttccacgatacctatcagaatcgtcgacgttggagctctcgacggacggaatccagtatgcaaacggatagtgggttttggcctagtaagagcgtgaagtacgactgatgtattaggtcaagcgaaagattttcttggaatttgctcacttaaatctgcagacgatggaggcgcaggcgccgtggaacgcgtttcttggggtaaaaggggggtctagtcgcccgctcgatctggaagttcctgctggaaaggttgttggccaagtgttgcccacacccgactaaacaccctcatcgtgtgtgtggcggcctatgggtagtaatagtagtcaggctgcaatcgagtagtgtgggtttgaccccgagttcaaaggaaacctagggctctgcagacagtggaaagcggcattatcttctgactaccgctcggcttagtctaaaccctttcgggtttcttttgcggcgagtggatgccaaccttactttatggtcaagaacggatcaattcagctagtcttcaggctctttcacagcgccaaagcgcgccttggacgcgtactccgcctccttctgcaccaactccttcaagcggtgatcggcggcagcttgcgccctcgaaaacttgccgtagcgctgctcctcgtagagcaaaaagcactctgcgagacgaatcttggacgggaggtcgacggtcacctggctgagcgcgaacgacgccgagtccagcagcacggacaaatcctcttcttggggcatttcgatggcccagaacacgcgcatgctgttgtccagacccccgatcgtcgagaacgggtttcgccgaggcaagcgcactccgtccatcgcagaggtggcgagctggctcttgctaacgaagtcgaggtcgcacgtcatcttgagcacgtagttgaggtctcgccacaggaacgggcggatctggatcatgcgtcgtcgccacccagcgaccgcatccacagtcgctagcgagagctctcgaacacgaatgagcgcctcaagcagctcaacactctggtcgtcctcgaacgcgcagcagcagcgcagcaactcttccagcccagcttctcgagccacgatggctctcaacacggccagctcctcctccgacagcagcccctcgtacgacaacgccttcgtgctggagaacctcaccactgagctggaagtctgcagtccaccttccttcggcttcttcaccccagtcatgtacggcttcagatgatcatcggccttgggcttctcgctgctagcggtcgccgactgcatcctgctcgccctagacacacacacactaacaaatcactgaacagtcgggctcgatccaaatccagctgcaccacaatgccctcgtcaaaggttctgcttcacgacatttcccttggttttgcttgtttcccagttgcacttgctatggtaggtccattgctcacttccgctgctcggcagcgcgacgtcggatctcttcccaggtcgtgggcttagccacaggttcactgggcactccaaagaaatagtcgtcttcgtcgtggcggagcggcggcagatttttatccgacccaggacggctggagtcccgcgagtagtgagcgtacgggtcacgagagacaagggcgtcacggtctccgaagtccgacgcttcctcagccggaggaggcttcgcgccgaagaaaaatggtgagcgaactccactgtcattgggctctccgaaagccgcttggtcgtcattcttccagtccttggcgtcttttttgccgcgcggtgtgtcaagaccagtgatcggcgggatgctgctgctgctggagatgtcgttgtcaaagcggcgaggcgcgggggggagcttgttcgtcggcttcgacacgaagcttcccggctccgcaacctcctcgttccacgagtcactgcagcagaacacagcggacaattacgtcagcaccaagagaaagaattcaatcaacggacagcatcaaaacgcacgtggcggcccctgaatgctgaaacttggcgtccagcccctgcacgaacgggttgtccgggatcttgttctttagactaccaagcgacaaagaacaaagaaaattagtgaggctgctatccaactgcaaatgttaaagaaaactcacatgttcctagcgcgcgccgcaaagggcgacttgtccgatgggagcatcaacaggtccgagaacaagtcccggcggatgctgatgatgccgtaagaggctccaaacagaccgccagctgcacaacaataagaaataagtattagataaaacaaataaaaagtttaggtgtcattcgagactcacacatcatggcgaaggcgcccgccactttcttctggttcttggagagtttccagagcccggccatgaccgacgagccgaagatggcgcccatggcggcgcggcgcttgcctttgttcgcgtagtgggccaggatctccatctccggctccgtcctgcagacaaattttaagtaagttttagcaatttctgtgttgttttaagggccttaaagttgaggcgacgtgacgtacttgccgatgaaggacgcgttcttgtccttggacatctccacgctcagcgtgcggatggcgtcgtccacgggcaccgtgccgaatgaggtcatcttgggcttccgtggctcggggatttgttgggaatgtgcggttaatagaatggaggaaggggattgggtaaaattggggatattatttggaccaatggtgcgtcttactggtaattcacttcaagttgcaactattgaagtagcttgtcaacatgatggggcagatatgcacaggccaacaccaggaggacagggagagtcgaacggctcaggcttgcacgcgtgctaatcgaggtgcttgagatagtatccaagaagatgtaagacattgatttccttcgtccggaaatatcgattgactaaaacatttcatctaaactaaatcacctagacgatggtgtttttggtggtctgggcaacaccctgcgagggataaggctgcagtgaagaagctctgcatggagcatggaacctgctcacttgtccttgaagttgtctcccgaaggcttgtccgagccgctgcaatacgccaagttagttcaagaccggtgacacaatgaatattatggattgcgagaacattgcacgtacgtcgggagtcctgcgcctcggagcagctcctgcgcgtacgcgttgtgcgagagcttggtctggagactgtgaagcaagcgcgggcacaagggacatcagatctcatgcgcatcaatttgaataacgagcttcacgttatgacgtacatttctctcgcttgagcagcatgcggagccttgtcgcttggaagctggagcagctccgtgaacaactcgtgtcggatattgctcgcacgcaccgacgtcctggcaccaatcgcaccaccgactggagatagccgcgttagatgctaaagttcacaaatctagcaacaaagcgctgtacgaaccgagaactcccacgacacccaaggtcgtcccgagtgcagctgcattccagacgccagccatggctgtcgctcccaagaggccaccgagcgcggcgcgacgcgtccctttctggcgatacttgacgaagacgtctctctcggccggcgtgatgtctttcctactctctcacacacatatcacagcaacagttagccaccttgacaggaagggagcgtgtttgttgtacgcagtgtggaggtactcacatccaaggtgcacggccaaagcctcgtggcccgaaaccccatggcccaaagccacgaggaggaccgggacgctcgggaccggagccgtccttcttgatgttcttggcaaacatctcggatcgcatcgtgcgcatgacttcgtactggtcgggggacgtggaaggcatcatcctgttaaaggtcgggctgtttgctttgctggaggagcttgggatgctggcaagctggagaattgaattgtgagcaagagcggctctctcaagagagagcccactggtagtcaatcaggctcctccagcgccccggtggaccatccgtgcggagtaaacgcttgtgttgatgccgagtgccagaatgaatgtgtaacgacatgggcaggtgcaccaaattaggtacgcatatggctttggcagtagctttttgaccggtatccgaacaaccaatcattctactccggggtatactaagtactgaaacgagcgtgttgtattattgtctcgaaacaacagtcctatcgcggtaagttgtgaacctaagtatgtgtttcttcagcgattattcctacgagacaagttcctgtgctaagactcgatcacgtccgcggtaacacacgccatgattttatttgtccgacttcagcagttcctgcgcaaaggcgttgtgcggcaacttctctcggatgctataagtgatgcacgagcacaacagaagaatcaagagcctttatcgcaacccccttcactgtcaaatcaaattcaatttaccacgtacatctctcttgcttgggcagcgcgtggcgacctctcgcctggaagctttaccatctcgcggaacatttcctggcgtattccgctcgtgcgtacagacactcgggcaccgatcgcgccgcccactgaaaaaggtgagtaagaattgcagcacagttgtagttagtatctccttcttgccgtattgaggcaggttcatagtgaaagaacgcactgatcactccagcgacccccaagaagcccccagcgcagcgactttccaaacgccagccatcgccgaagccccaaggattcctccgatcgctgccctctgtctgccctcctcccggtacttcatgagcacgcccatttccgtcggagtgatattcttcctaatactcacacaaaagataaacgatccacggtcagtacgtcgttggggacaatacagcagaagggtagataatgacacccccatccttgacggtcgcctgggccaaaggagcctggtccatcgtatccccacgggccgaaatgtgcagggccaaagccccaaggcccaggacccccaaaaccccaagggccacgaccaccgcagcccccggagccgagtttccatggagcgtcgaacacgcctggactaattcttttcttggcgagctcggaacggagcgtgtacaggacctcgtactgttcggacgacatcatcttcggttgctgtgcttgtcggcgggctgcaagttgaattgtgagctcggatattgctgatgcagtgacagccgtgaagcattctcgtcccaaccgacgcagcgaatgcttgtacagggcgtcaacgtgctgcgttgactccgttccgatgttgacgccccgcacagctggttgtcgactgtgagtcctctcttctttgcaatttgtattggaccacgggtttgttgcttatgaagtgcgttggtcgcgcaaaacttggccgtctccaaaactgcatgtacatgtatgatacaagcagaagcaacagcaacaaaaaaaactcgtcatctttgaagtagtgtataaatgcattatgctgtgaaattggagtgctgttttctttcggttgtttctgcgagggaagatcgtcttatcttctggctttcggtaccttgggtcttgtgtgaagctacttggcaaaccccgattgctgaagcagctcttgcgcgtatgcgttgtgctgcaacttcgtggtgaggctacagatcgaaatgcaagtagaaattcgtcagctgcaaccgtggcgtgaggcagaatctccatcaagtttaaccttacatctctcgagcctgagccgcatgcggcgacttgtcttcgggaagcttgagcatttccgatattatctcctcgcggatgccgctggttcgcatcgaaacgcctgcgccgatcacaccaccaactgcacggatacatagggggagtccttagttagttgatcaaccagtagcacagtagcacagtagatcattagccacgcacgtactgatcatgcccgtgacacccatgggtctgcccagcttcgccatcttccacacgccagccatcgcagacgcgcctagaagtccaccaacggcggcgcgctgcttgcccctccagcggtacttcatcagaacgtccctctccgccggtgtgatgttcatcctacacaaacgaggtcaaccaaagagctgtgttttcaaggtagaatcggatagcacttacatccaggcgcgaccgaaacctcggccactgaagcggtcggggttggtatctccctgcttggcgaacagctcggagcgcagcgtgtacatgacttcgtactgctcggacgacatggaggacatcatcgtggtggtggcggttcaggtgggagaccttctgtgctggtggattgaattgtgagtggggatcaaccagaagtgtgcttgctgccgttgccgttgcggtgcagaatgcttgttacttcggcgtaagcagttgtgatgacgcctgggagcaggaatgaatgctcaatgtagccatatggcagatggctacacctctggagggcttgttgggctgctatcgtagcgggtacttcgcgcagtgttacttatcgccccgcagactcttcggcagcgggccctctagatgccgcccactacttcgaagatggatgcgtaggaaaatattttagctgaacaaattcaaattcaaaaaggaacaggacggtgtagaaatgaaatgatcgatgtgcctctggaaaaattgataataaagtcgcgccggcaatgtgtgtaagtgcaccaagttgtagtaacgataccctcgaaagaaaacaggaagacctaaaagtcaaatgcgtgcaagctgttacccggataaaagggaatgatggttctggtaagcttttcttacaacaatttcctttggcgttgtgaagtggttatttaattttaccacgcgcttcggcttccacatccagtaggttaagcattcattcgcaaccaacaggaatgcttgcacaagcagccgttaacgccgcgatcgatctgacctcagctatcgccacttcggcgttcacttttcgattttccatccttcgagcacaccaagcaccaagacccaagaacaatcgccgatccgagtacgatgctgacatccgaccaatacgaagtcatttccacgctgcgctccgagatggcggagaaaggtttcagtcggttcgggtgtcgccgaagctggatgtgcgttgcctaactatgaactcccaccaccaccaccaccacaaattgggcgctaaagattgatttatgctgtttatgagcaggaagaacatcactcctgccgagaggaagttgttcatgaagtataggaagaaaggtgcacgccgtgctgccagcggcggcctctttggggcattggcgatggctggcgtgtggaagatcgcagcgctgggaacggcgttcggtgtcacgggggtcatcggtgcgtttccaccagttcacctgacgtctacactttcatttgctaatttttgccgttgacttcgtttctgcagtgggcggcctgttcggagcttggatggcgatgcgcgctagtcgcattcgtatcaagatggtcaaggagatggtcaaactgccgactgacgaatcccctcaagcgtggtgagcttttacttccgtagtcgacgagcggctcagcgttggagtggaatgatttgcccatttgatggaaaaggacttgagttggtggactacaacgaacttcggtatcaacgcccgaacgctgtcctccgactcgaccacttccggtttttactattgctgcttcgtggtaagatctcgccactcgaaatgtatgagctcttaacgaaagaactcaaacagcaagtgaaatcaatcaaacacccgaaactgaacgagccggggcgaggacgagagacatgggaagttatcatcgagggaccaatatgcccgctggtgctcagcaagcacacgcgcattcacctcccgaaaactcacctattgattcacctgagcgatgtacacattaatttgccctgtgtgaagtgtagtagcaagtggcactcccagatgcgatgcaacgctcagtccgaaaattgcaagcaggcagcagatcaacgcacgctgaagataacaccgcaggaagcaagcccttcgattaaaaaggagatcgcatcggttggtccctcaatccaaaacgttgaccagctctttgacttttttgctcgttggggcgtaccggagaccaaaccgtgctcgacggagacgaaactgaagcactaggaagatgaggaggtcaccccaggtaatgtggaaaatgatgatagggttatgggtccctcagataaccatgacaagaccataatgggggccgacgaagcgaagaaagctgacggccatgtagacacggacattgaaatggaaggcgatagctcgagcgacaagaacgccgcaacccctgaaaccagagaacgcttgctggagacagctcaatccagcaccaagacggacgcagtggccactttggatgaggcaaaacctgttgcgtacaaggcaagcaaacccatcccggtccagctacaacaaaagcgcgcacgcgccaacactgaggctgaactgcaagaagttgcgccccggaaccaaggcgatgggaggccacttcgcgaaagagacgctgctacccatgagcagcatcggcgcgtacttaagcaactttcaggaagaagacaaaagaaaatattgcgtcaaggctccaaaacgcaagagtgctcagtggcatctctgtcgccaaccaaacaacaggccgcggagccgaaagcgctaaagcaacaatctctttttgacgcttttgccggtgaacgggacgcaccgcatctaccttctgaagatgaggtgaataaggggacggatctggagaagacggagatggatagtgggccgacaccttcggtcctcatggaaacgcaagatgaagatgaagacgtggaatgcgtgggtgaaaatctaaccgagacaaaacgcgatctccaggtatggctcaacgcgattgggggaagatcacggacgtagaagctaatgggcaggtgggtggcagtagcgcacaacgatatgacgccaaaaaccatacaggaggcaacaatgtggaagagaaagatcctaaatgtgctgctcgcgaaaataaatccacttgtggaggcaaaggtaattgatcttgcaactgaacaaggaaccagttattcatcgagcaccactccgacgacgacacactcgaacgcggacgctttactcatgtactgggactcggagcgaaggcgcagcgtagatattcccgttccgcagagctgctgggtgaatatgacgattctgcatggggcaactctgtttctacgagagccggtatatgtactagatgtgcaccaggatggtggcacatacctcggaatgtatgcgtatcgaaaagtagaccgccacggaaaagcagaagacatcccatttttcgcgaacattcatgccgacaaggggctacaactgctggaaactctgcgaggaaaaggagttcgtcctgtcatgattgtacttacacactcggttcacaaaggcagcgagaactcaccaccagttattaagaaccactacaaagcagtgactttctcttctcttccgaccgggctcctagattcgagagtgtacagctccatgacgaaggcccatcaagcaacgctaacagaacaaggttttacgctcaaggttggaggcaacttagctcaagcaacgctcgcacgcacggcatccaatgcggtaaccagagcacggcagcgagcaggagaaatggccgactcttcttcggccggctccactgattcaacaacgagcacctttggtattcatggtaccaataatgtagcagaggcgggcacaaagcagcccgagacctctctacagtgctgaaagttgccacaggaggaaaatttcgtcaggtccagatccagacctcgatacgagatttctttccgcacgtgtcggaaactcagagcagcaagcagcttcggagatgctttcgacaggttcggccaaagctaaggatcagcaccaccaacacaaaacaaggagcgagaacgcagaagagcgacctttccccggatgattttacttacagcatggttacccaaaatgtgggtggccttgcatcttataccaagcagctcccgcaattatttcaaggatttcgagagcagcagcgtaatggactcaatgatttagtgattatacaagaaacgcacctggatgaggtggaatcggcttttgcagagcagcagtataaaacggtgtggggatacaagcagagttcacggtcggtcgtctccttctggacacccgctcatgccggacagaggaataagcgggctcgtcatggaggcgttgcaatcttaatcaacccgcacggggcaatccgcaacgcgcaaccttggagccaacatctgtggacggcctataggcagttcattaggtgcagtctgcagggggaagagttactcgtaatgaatttgtatgccccatccgatcccaaggcgcgcaagcaatttttccagcggcttgtcgacattccagtccccgacaacgtcaagctcgtagtagggggagacttcaactgcgtcaccgattcatttttcgataggagaacgagcgctagaaccggagacgcaggacgagctgcgttgcaacaatggctggaatcgctacatttagttgacgctgtggaccacctaaagccgggcgatatggaccctaaagcaaggaacgattttgcggctgaccatcatacctacttctacaagcttgcacatgagagggtaggctcaagtcggatagacaggtggtaccttgcagcaagaatgcagccgtggattaagcaagtgagcaagaccgggtgtccaattcgctcggaccattacggtgttgctctccagctgcaaagtcccaaaaacccgctgcgcatcaaacgcctgccaaaaatttaccccatgcctgaatacatgactgccgccgctaaaaatctaatttcttctcgaatcggtgattttcacaagcacgtacacgaaatagtggacgaagtggacgccccgtgtttggctgagagctgggatcgtttcaagaaggggctagcagatgggctcgggaagcttaagcgtcagtgtcgacgcaagatgactcgaggttttcggcagcgcatacgaagagtgctaacgaaactcaagaagtgtgaaagcagggaaaacggagcttcggacctaagggagcagctgcttgagcaacttcaagctatacaacaacaatgcagaagactgcgaaggcggaacctcacgcgtcagcacacttggaccggaaaatccaacgccaagtttttctttcgcagaatatgctcgaagtttagtgacaacattattcatgatctcaagcagagcggactgcaaccgaaacgggatcctgcggacaaagctaatattttagcagatgcgtggtttcctgtaatgaacagcggtagcgtggacgtcaaatctatcgatgaatatgtggagcggctgaagaaagggtggaccaaatacgatctgagagatatggatgacaaaataacagaagcagaagtggaggcagccattcgcaagtgcaagcgcgggaagtccgcaggcccagacaaacttggcaacgactggtacaaggatcattgtgatattctggtgccacttttgacgattttatacaatcggtggatagaggaaggagcctttccgtcgagcttccagcaaggctacatcttcagtattaagaaaaaaggagatgcgagcttgccgctgaactatagaccgatagccttgctaaactccgactacaagatcctgacccgcatcttcacacgaagacgcgctctcacatttcgaagctggtccacgaaacacaatttgggtttgttcccggccgaagaatacacaccgctatcaacttgttcgaggcggcaaagcgcgtttgcaaaaccaacccagaacttctagatgctcaagcactcctactcgatttcgctaaagcgtatgatacactcgatcgtcactacttgctggcagtgctacgggccaaagggttcccgcccaaattttgccgcatggtcgaagtgacgcacgccaatacaacagccacgtttctcgctaatggatacccttcggcgccaataccagttactagaggcataagaaataagtaggcaacaagttctcttcgagtttctttccccggtaaagtacggtatcaatgtcctacttgatgggaccgctgtagtcaagaagctatggaaagcaagctacctcatgctcaaggctcgagttgcaggagctccgactcacgtaagcctctcgagtgctgatcgtgtttattgacgaatatatcggtccttgccatagcgtgcgagttaatcgacgagtctaagcaatcattacgactactttgacgctagacacgatgaatttcgctccaagtcgtccatggcgtgctgcacacatcctacagcctcacacagtcggtgtcgcgagatcacaacgtgaggttgtgtgatcagagtgtgcgagtcgtgatcattatcaactcgcagtcagagtgatgaggcgccaaaacatcgtggcagcgaagctgctctccaaaacgacaacatgcacattaaaaccatgacacttgttgcgatcacgtaccggttgagtgtttcctccgccaatgctgccagtgtgtggttcggtcggagggttcagagatcgttgactagcagcagcaccgcacgtagaagcctgcgccacaacgaagcacagcaaacagcaactgataaagggacgcacaattcgagtcaactgcgatgtactatgagatgcagccccaacaaagaccgtagcaagccccctgctacgataggtaagggccgtgtttgcctacctgggctctctaggcgtgcttgggcttcttgttccgcgcatcctggaaagtcgtcatgccctgaccactaccgatcacgcccacgcgaccctgcactgtgtctggcgacgcaaacatactggaaccgcgcttagacagcactccgctgacacctttcttcaaacctttcttcttggccttgtgctggaaggccttccagtcgtgctgcttgatgttgcgctcgttgtcgatgttcttgtgtctgttcaggctcttgatcgcacgcacgcgtttgcgcttacgctccttctcggcctcggagtctgtgggcagaatctgcaggttctccgggatcttaatgggcttggcgatgaccgcaggggccagggccgccgccgccggtgctgcggcagtatgcgtggcagtagcatcggctgcgttagtagagtgagaggcggctgcagcaacactgactacctgatcctgcgccgccgcggcagctgctgcaggcttcaaatactcgtacggcacctcctccgagttgccgtagccgtcgaacagcacctggaagcccagggccgtgactttggtcaccgagcacgggtacaccactgcgtctgcgtagtacttggcccggcacttgaatccctcggcaatagcctctttaggcagcagcttagcagcatcttcagcatccacctcgatatctcgcagagcatcgtcctggagctccgcagacgtgccgaagcccaggaacttgacgttgtagctgccgtcgctcgtcacggactccacgtgcgccgggtaccagaccccctgctgctgtgcttcaactacacagcccggggagaacttcaggtcttcaatgtagcacaacagcataaactttagtcagcattccgccagcttctttcgcatcagcagctctagaggggtcatttaccgagcgttggcgtcgtctgctgctgctgcttcttgggctcttggggcgctgcatcttgggtggacgacgcagcattcaccttgagatcgatctacaataggattcaacagtaaataacgccgtgttaaagataaaatacgctgtaataaggataagccacgccgaaacgaacgccccgccttaccgtctccttggtgagctggatgacctccacgaggtccttggcgatgctcaggaactcggcattcgtcgggtcgctctgcagcagctcgtggatgttctgcagctgctccgtgaacgtcacgaggcgcgtctccagctcctccagactcgcgtccgtcgccatcgtctttgtttaggagagatgagggaggtaattaaccgctcggtaagaaatcaccaaaataccggtgagctccggtatctaccggttcgaatattgcaaccccgtcgtcgacactacacgatcggatccttccttccttccttgctgggcctgagtttcctcctcctgctgccgacccccgcgcgctatcgctcgccatgaagaagctggtgatcaagccgtaccgccagaacatgggcatggaccaggcgcgcgccgcggagatctgggcgtcgctgcgcacggccatctacgagatcttctcgcacaacgcgagcctgctgtcgttcgaggagctgtaccgcaactcgtacaacctggtgctgcacaagcacggcgacctgctctacagcggcgtggtgggcgtcatcaccgagcacctgcagggcgtggcgcggcaggtggccgccgtgtcggacgacctgctgctcgtggcgctcaaggaccagtgggtggatcaccaggtcgtcatgaccatggtgcgggacatcctcatgtacatggaccgcacctacgtcacgcagaagcgcaagctgcccgtgtacgacaacgggctctacatcttccgcgacgccatcgtgcgccacgacagcgtgcgcgaccgcctgcgcgcgcggctgctgctcagcatcgagcgcgagcgccacggcgagctcatcgaccgagacctcgtcaagagcgtgctgcgcatgctcgtggacctgggcgtgcactcgaacgccgtgtacgagacggactttgagaagttcttcctcgacacgacgctcgacttctaccgggccgaggcccaggccatgctggacgtggccacgtgccccgagtacctggagaaggcggagcagcgcctcaacgaggagggcgcgcgcgtgctgcactacctgaacccgtcgaccgagcacaagctcaagaccatcgtcgagacgcagctgatcaagaaccaggccaaggcgctcgtggagatggagcactcgggctgctgggccctgttccgcgacggcaagacgcaggcgctgcgcaggatgtactcgctcttccgacgcgtgcccagcacgctgccggagatcagcgactgcgtgctgcagtacatcaagacgaacggagaggagattgtcaagacgcagtcgaacccggagacggcgttggacgcgtcgcagtttgtggagaagctgctggcgctgcgtgaaaagttcatgggcttcttgtcggattgcttcttcgacgacccgcagttccacaaatcgatcaagcagggcttcgaggccttcatgaacacgaacacagtgtgcgcggggtacctggcgcactacctggacgagctgctgcggtcaaagaaccggtttgaagaggagatggatactcgagtgacgcaggtcatcgcgctgttccggtatttgcaggacaaggatgtgtttgaggagttctataaggtgctgctcgccaagcgacttctcaacagccgcggcacgtcggacgaggccgagaagctcgtgatttcaaaactcaaggcagaatgcggctatcagttcacgtccaagctggagggaatgttcaaggatatgagcatctcgaaggatcttatggagctgtacaggaagtcgggctatgacaccagggggagcggctttagcattgatccgtccgtcgctccgatgccgctgtcagttcacgtgttgacgagtggattctggccgacggagatgtctcccatgtgcgccctcccgctggagctcgtccagctgacgcaaacttttgaatcgttctactacgcacggcacaacggccggaagctggcatggatggcgaacatgggtactgttgacgttcgcgctacgttttctgccggcgtggaggatggcaagcgccggcacgagctcaatgtgtcaacgtaccaagcagtcattttgatgctattcaaccagcgcgtcgagtggcgctttaaggaccttgtggaccgtacgcgcatcgatgtgaaggacctgaagcggcacctgatctcgctgtgcacgccaaagtacaagattttgatcaagagctccaagggcaagcgcatcgacgaggaggtcgatgtgttcacgataaacgatgcgtacaagtccaagctgcaccgcgtacggataccgctggtgtcgcagaaggagacgtcgttgctgccggttgtagcctccagctcaagcaacccggcggatgcgctgccgcccactgtcgccgaagaccgcaagcacctcgtggaggccgccatcgtgcggatcatgaagacgcgcaagcagatgcagcacaaccagcttatcgccgaggtcacgcgccagatggcgggccgcttcaccccgtccccgcagctcatcaagctgcgcatcgagagcctcatcgagcgcgagtacctgcagcgcagcaccacggaccgacgcatgtacaactatttagcttgagcggtggcgtaagcgatagcgatagcaacccatccgacaaaatggcggcgaccttaaggccaagaacccagaaatcgccgagcacgagcgacgtcagcaattttagagccccctggagagagagacaacaggatggagagcagcaatctcccgatgtaccattgcattgaatgcaatgcttgccgtgcgtgatatttctttcgcctatctcaacattttcttttcgggcttcatccccttcgtttagtgacctgatacattacacaccttctctcaacaccggaatgctgcttcgtttcccccgctatacgaacatgtggcgccaacaacacctgacgcaataacgccccgagccaaaaaccaataggtcgcccaatcgcgagccaaaatggccgagtcggagctgcttgggctcgcggggctgcgctccgtggccgtgcagtccacccacatccaccgcgtgcagctgctgagcccgcccgtgcccaccgccaagccgcgcgccgccgagccgagtctgcgcgtgcgtctgcagcgccagtggcgcgcgaacgcgtggctgctgctgacactgggcttcctgtgctgcctcggccgcctgcgcgccgacgccgccgccgccaccgccggacccaagagcagagacgacgacaatgcagtggcctcctcgtccagcggcgacctgtacatcgtgctcgtgagcatccccgtgctggacaagatgctgccgctcaagcacctggccgagacgctgctgtcccgcggcgtgcgcgtgggcttcgcgctgcccgagaactgccgccaatgggtgagcgacctggaggggctcgagttcatctcgctcggcaatatcgtgggcaagggtcgcgccacggcgctggacccgacggagctgcagacgctcggcgtctacgagagctacgccagcacgctgcgatactacgcgtcgttccagcggcccatgttcgggccgctgctggaggacctggaggacgaccgcccggacctcgtggtcgtcgacagatacaccttcgcgggcttcgacgcctgccatcgactgcaactgccctacgtggtgaacgacccgcacctgctcttcgacatagactcgccgcccgcctacatcccggcgccgttctccaactttaccatgcacgtacgaactagtgatgaggttgaggtggttgagtttcgtgggaaacaaactaacttttcttatggtatttttgatgtttgtttgtgtagacgacgagtgtgctggagcggtgtctgaatagttactaccgcctgcgcttccgcctggggctggttcatgtgtataaggagatcaacgccgtgcgaggggagcatggactcgagcccatcgacagcaagcaccagatgcacggccacgcgctcgtgctggcgaactcggtcttcgggctggacgaggcgcgccccatgacgcctcagttcaagatggtgggcttgctgcagtcgcagaagctgcagctcgagcgcgcagcatacgaagacagccctgctgctgcacgtagcagcctcccagcggcgctgaccacgtggctggaggcacctgagcatcgcgacaagccgctggtgtttattagttttcaaacggacgtgctgttgaccccagagttcatcacaactattgtaggtctcgagctgttgcgatggatgatcggttgggtctacgccgctgatactgatctttgctgtgttgcttttgcagatgaacgcgctggagactgtggatgtccgcctcctgtggaagataacgctgcaagaacaaacagcattcgatttgcgctcgcgtccccgagactcggtgttatttctcggcgacggagtggacgacgcagcagtgctcgcgttggcgcccgagatcgagctgctgatcactgccggggatttccagagtatgcacgaggctcttgtcgtgggggtgcccatcttggggctcccgcactcagccgagcagattgaaggattaaatgccgtcgtacgagcaggcgccggcctccgactggatgacaaatcgctctctgagggcagcctgcgcgtggcagtggatcgaatgctggtggacgagcgtgagcgctttaaagcaaatgccgagcaccttggggagttggtgaagactggcggtggagtggagcgtgcagcggacgagctgctggctgttgcggagttcggagcccgtcacctgctgcccatgcgcaacctgcagcccctgtacaagacgtacctcgtggacgtgtacctcatctacggagccatcctctgcggcgcggccatcatcctgcgcacgttcgtgtcggtcgtgctgtccgtgttccagccgctgaccccgctcgaggtgctcgaggcggaggagctggccgcgaacgaccttgtgagccgagccggcgaggtgggccataaagcggtccaataaaccacaacaaacactgcgcgccatgaccaggtgcagtgcctctcaacagttgcaggcgtgtgttttcgggcaggtcgagtctagctcgcgtttgtgtttcgttgacaggcgcatggatccacagcgtctcagccggcctcttcttgtcattcgttgcagggtggtggtacgttacccagccaatctcctcggtcatgttggatgaggtgccgcagtcaaagcgcagccctaatagactttgcggcaccacggcattgccaatgcgttgcggtgcgtaagtatcctgcaagcaggggcggattaaagcatctgcagaggcgccagccgtcgttgcattgtgctatgaactcttcaacgcgctttctacgcccgcacacatcccgtcacttgcgagtcacgacggagcgcctgtcctgaggacggaagcaggagcggaatcctggggagactgcactgcactccaggccagcaggcaggtctcgggagctagctacagtatccatgcatgtacagtcacgggatcgccaacaatctaccttgacatccatcgccagacagcagctccaagggagcccgacgctgacacttcgcgccgtagcctaatgcccgcgcggcgccggaaaaccaagcggtgctgctacagtactgtacagcatgcggagaccgcgattggcacaaccttcgcgggtctttactgtagaagccacagtgttgctagtgagtagagagagctctctccagtcctgttgcttccgatggaaaatcgcagtagcgtccacttgggaaaccgcaacgtgcgtggcgtccgtccaccaggggcgagagttgtcctccggatccattcagacaacacgcccgccggtctcttaccactgacggctgttccagatattcggtccacggcgtgctcgaccgcccttacgccccaaagagaacggagccaaccccgaggaacagaactccctgtcaacgcagtcgacgacctcctctgcgtactcttcacccacgcgcgtccggccagcgctgggccacgcaccgatggaccccaagagcctcggccacggcggcagcggcccggccgacgccagcctcaccgtacacacagacgacaatagcaatagcgccgcgctgctggagcaggagccgacgcccgacgacgacgcgcagacgcactacgccaaggtcgagacgcccgtcaaggtgcgcgccaaggacttcgcgcggcagagcacgttcaactcggacgccgagtcgggcggccaggggtccattgcctcggccgcggacgcggacgctttggactacgcggcgcggcagcggcccacgatcgtgtcgaactaccggccgagcagtcgaacgcccgaccacagttctacatgtaccgtgcgctccagcggcgccgacaggatggcgcacgacattcagttaggcccccggaccatcacgcttgatgacgacccgttgggcgtagaacacaagggagaacaggtagagcagtcgcggaagggcacggacgacagcagcaaggccgacgccacggagcacacgatgcagatgagctccatcgagctgcgggactccgttctacccaaactaccgaggacctacctcaacggccagttccagagtaactcgtacttctcccgacggctgctgaggctctcgcagctcattgtgctgggggatctgatagcgctgggcttcttctacttctacgagtcggacgcggacgacatccgacacgggcggctctacgtggggtccccactcaaggtgctggtctcgagcgaccagccgagctgttctacctcgctcgcgctcgcggcgctggtgtatcacttgttcccggcagtatttatcttgggtcttccagcttcaggcttgaggatattcgagccgttcaggagggagcagaggttcgacaggggcgggaggctgcagaaggtcaagcgcaccgtgtgtctgcaggtgtgcgagatcgtgggcgtcttcatcttcctgtacgaggcgctgatcctcggcttcttcgtctactacgtggcgagcggcaagatctttgtggactgcgactccaacatcccggcctacttcttctgcttctgcgccatcgccatgttctggctgctcttcgtgctcatgcgcgcgttcgcgcgcttccgggagcacctcaagatgcagctgggcgcgttcaaggagagcgaccagacgggcgacgtcaaggcgcacatgctgcgctccaagatgaagcgcaagaagcggcagcagcagaagaacaacagcgatggcgccgagtcgacgccgtccaaggctgcagtggtcaaggacgtgagcaagaggctgttccgaggcgcgcagctgggcgatctcaagctcatccgccgctcgatccgcatcgccaagctgcacctgggagacaacttcgcgcgcgatctgtacccggacccggtcatggtgttcggcatctttgggctggccaagaagaaccccatgcacgtggccgcgtatcaaggtaacatcgcggcgatggatctgctctacaaggccaacttcagagtcaacgcgttcgacaaggtctcgcgcgtgcgattcagcaccggcgacctcttctggtacctcgcgagctacttcatccccaagcccgtggtgtcttcggacgagacgtacagctccgtgttcaagacgacgttggtcacgccactgcactgcgcggtgagtacaggtcgtctcgctgccgtgcgctggctcattgcccacggagcggacgtcaacctgtgctccaagtcttcgtaccgctgcgagagccgtctcccgcccattttcctggccgaccacccggagatcgtgcacgtgctgctgcgagctggagcgaaccacctcgcgattccagatcctggacatatgaacacgataacagtgctgcagcttgcgtatttgcggggtaactatgctgttgcgcaggtactggaagattggggcggtgatgtagcgcttacgccgctgcacgcagcagcagcagtgggcgacatcgcggcaattcggagtttactgcgcaagaaggtcaacccggacgttctcggtgagcttggctacgttggactcaacaagcgtacgccgctgcactgggctgcagtgaatggcgcagtcggagctgtggagatccttttggccgctaaagccaatgctaacttccaggatgctcacggacggacagctcttcactgggcagcgcgcgtgaatcgcgtggatattgtacgcgtgctgttggcgcatggcgcggacccgactatcgtcgacgacagcgatatgacgccgatcatgtgcgccgcatgcgccggcgggacgactgtggatatgttcaaggcgctggttgctagtggtggcgacatcaaccaccagcttcgttctacaggtgatactgcgctgcacttggctgtgaagctggacgaccagcagacggcgctggctctgttgagtatgggaggcgatattatgcgcacgaaccacgacgggttccggccgattgactgcaccacgtcaacgagactgcagttcgagatcaagcgcgcggcaggaacgcgtgatgtcatgatcagctacacgcactcgcacatggagttcgccctcaagctgcgcaagtcgctggaagacgcgaacattacggtgtggctcgatctcatggaccccagcggtatcggcggtgggtccgtgtggcgcgaggagatcgcgcgtggcatcacgaatgctgcagtggtgctgtgtatcctgacggaggactacgcgcagtctgagtggtgtctgaaggagttagcgttggcgaagcaggtgggcacacccatcatggccatctccactgagcacgccaaaatttccgaggagctgcaggtgtatttgtacacgcggcagcttgttccgttcgagagcgctatcgccaaggtggagcaggttaacgagaaggagacgcgctacgaatacgacgaagacgcgtacaagaaccagctgcgtatgctgctggatgggatgcgcgatgagatcgagaagcgcaaggaggacaacatcaagcggaacatgcgtcgtgccgagacgaacccgatggcaggatcaggccacgctagcagtggcatgcgtagccgccgcctcaaccacgccgcgtccggtatgagctctacgaacacgtacggcatggactcgatgaagtttgacgagcgagcactggcagcgttcgacacgcccaactactattcgtacgactcgggcgcctcatcaatccacgagatcggcgatgactcggtcatgcccgtcgtcattggcaacagccgtcggcgcggtccacccggctcctctcggtcgatcgggtccaatggcgtgttctcggccagccagcgccaaatgcgtctcaactacgactacaacgccacgaacctgagcatcctcagcagcaccagcagctcgaacagctttgtggacgatggcggcgtatcggatagtattgtgctcgacactggcggctactacttccacagagctacgagtaaggaaaagcccaagcgtggcggacgcaaagacgtcatctcagagcgagtgtcgaacggaatggacgagccagggacgagcgacagcatcgttgaggacttgcaggagctgaacacggctacggctagtggtgagcagttcgtcttcatcagtcatggcgactaccaccagcggtttgtacgcaagctctgtgttgaaatgtgtcgtgagggaggcttaaggtgctacgtggatcgaaagcacatggttaaactatcatcagcgattgacgaggacacggaggaggaaacagcaaaatccaaccggccagtgctgtcgcggaatgaagacatgtccgtccgtattcacgaggcaaaggaggcgattctcaagtgttcagctttcgtgttgcttatctccgagaagacactggcgagcgagttagtgaaggaccaactcgctttcgctgaagacaaggggaagaagatcctgccggtggtggtgaaccgcatggactttggtctcgacatcaagtacagtctcgcgcgcagcgagtttttccacttcttcacgaagggcgacatggtgggcttccgtcagtcgctacggcacctgctggatgctctacgtgaagaagtatacggcatcagcatcggcgggccacttccaagcttcagttccggtgggcagctccccagtttcagctcactgcccagctttaacggcggcggggcacccggtaggggcagcgacgtgcagctccgcggtgggtttgcggacctgcgcgacagcttcgtgtccactgggtccttcaacccgtcgttccagggtcctggcgttgaaggcagcatgcgtcgacgccgtccgaagtctcagtttgcgagtacgcggagtgacacgtccaacttcgggttaccccccacaaggctgtcacaaactttcgccgagacgacaggaaccacgcgcagtatcacgtcggacatgagtctgtcgcactcgatgatcggcaacttctccaccctcgtgggacgcatcgacgacttcgacgaggaggacgagctgtcgtacgccggcatccaagacgacgacttcgactcggacgaggaggaagtggaggagaacggggaagtgcgcgtcgtgcaggaggaggctccgtcgttctccagggcgatgcagatgcagcagcatcctgctcttggcgcgctctcgagcgacggcagcttcgacacgcgccaacgaggatccaactcgtccataagcatgctcgagctcgccgaatcgggcgacagcgtcaacatcagcttcgatgcactgctgggggacaagacgccgaccaaataattaactattcaacacaatgatgagagtactagctgtcaagggaacgccgagctctctttttattagggcggtggcgagtcaaacgtaacacaagtgtaatgcaacgtataaaccgaagtttgcagtgtagtgcgttgatgagggattgctgcgcttatttttttattaatctgcatttttcttcttggtctatcgcatttgacgcaattcgtgcaatcttcagttcttgtatcgcttagacgatgtcttcggcagtgctggcgctgccgtgttggtttcgagccgacccggtcaaccgtagactgctttccctgctatgtgctccagcacttgcgctcgagagacctgacccagtacgcgatcgatcatacctgctgctattgagcagaaggtcttcgtgacggacgccctcgagaatgtcgggctcgctccagccgtggcctccgaaactggacgcggatccgcctctgctcccagttcttgatgtattcaacgccgcaggggaggtcatgtaggttcgcactggcagcgtgggcagtagcaacgacgagtctgtagacaacaactcgtcgaacggtgactggacctccacgacgtcagtataagccgcgagtgatgaccggtgagactgagaagaagcggacgatacgggagacagcaccgccatcgcccccaaacttgcgccgagatcgccctgttcttcctgctgccgacgctggagacgacgttgccgagcttcattctgctgttgtagtcgcaggaagttggtgagctgctcgatgctctgctcgtatccgagcgagaggttgaagtggtgcaccatgctgcgggagaatgtgtagcgcttggccagatcaaccttgtgcagggacagaagaatgggcaccagcagcttcccacggtcttcagcgaacgccagttgatcagcgaggaggtcgcaggtagcggatagcggcgacagcaccaccagcacagccgagcaagctagaatggcatccttcgcagccatctgccgtgtctgcacaggcaactgcgttactggctggtcggcaccgcccaagtctgcgccgaagccgccagcttgggcttcactgctcaccgcatcctctggagggtgagcatactgcaccgcaggcacagtttgatccacaacacagcgaataccttgcttgagcattgacttctggaggcgcaggcagaacgaacggtggtaatctccatgcgcgatgaacacgaacgagtccgttgctgacgttaaggcaagtgacgacgccaaagactcgatcctccgcagcagccggaatagcgggacattcagcgggccctcagggaaattgatctgcgcgcttgaggcctcgtggtcttcacactcactgtgcttggctgcttctccgccagttccacatagtattcggtcatcttcctcagggtagcactcgctctcattgccgttgcgacggcttccatggcgagacgcatctccggcagtattaccatcagtctcgtggcctggtagctgtacctgttgctgctgttgctcctgacgtcgagccaaccgcgctcgatgctcttcaatctgatcttgaatcccatccagcagcattcgtaggcaatgacaaaaggcctcgtcattgtagtcgggaaccaactcaaggttgcttgcaacacgcttgtccagcatattggtcacttcgcctgcattgtcatcctcgctctggaaaacggattcgccctcacgtgaatccgtgtcttccatcgtgtgcgagctgttgctcggcatgcgcggacgctcttcgtcgccaccttctccctcaggatacggagctggaatgccgacattcacatcgtagttgtgtttcaccgccggccggaagtcgatcacctgacgcgtccacaagtacacctgcagctcttccgaaatctccatgtcctcacactggatggccacgacgggaatgttctgcatcttggcgaaagccagctctttcatgcaccactgcgactgcgggtagtctttcgtcagcacagccagcacaagagcactactttgaatgccgcgcgcgatctcctgtcgccacactgatccaccagtgattcctgtaggtcccatcgtatcaatccatgtcgtcacccgctggcgttccagtgcatctcgaatcttgcgcgccaacggggcgtgtgcatggctgtagctgatcataacgtcgcgttgtcctgcttccttcttcacagcaaaccgcagtgctggagagcgcgcgcagtcgatcgcccgctgaccaagtagattaactgctgtcaagcttaagccagcgcgaacgaaaagcacggcagcggtctggttgcgacgccgaagcgcgacgtggagagccgagtcaccgttgcttgtacgcgtcgcatgcaagtccactccattctccagcagcaactgaaagatgcgtgggtccagcccacgcgctagtgacctctgcccgctcagcattactccaacatcaccctcgtcgtcaccaccttcatcagtcacatcgtcctgcacgcggtcatcgcccagtttgtctcgcttgccggccgaggttttagcacctctcttgatcgacgcgcacgccccagctgcacaaatacagagcaacggatctccctgtgcgtcacgtacgttaacatctgcgccgctttccagaagagcttccactgcgcgcgtacgattcaaaacacaagcccaagccaatggcgaacggccaaagatgtcacgcgcgtctacattagctccatatcgcactaagaggcggataatacgcgcgtgaccacgcatcgcagcccagtgaagtggcgtacgccggaagcagccgatcacctgctcgccgagtgtatctggatctgctccgtgctccagcaaaaaagcgacttcgtggcggcgtccaccagcacaggcgtcatgcagcggagtcagcgtcacatcaccaccatacttctccatctgtcgagccacagcggcgttgcctgcaatccgcgcaacctcaaacgcagtcaacaacaagccactagaatctccagggatcgttaaagggttgccaccagcattcaaaagcaatcgcgtgcactccttgtccacagcccaatacagcggaggagtggcgaatcgcgggtgagtagacaacgcaggagcatcaggttttgcgccgtaacgcagtagcagcaacgtgagctctacgtggcccagtgtcaccgccacatgaagaggggtcaacagtgtggcttgaaagagcccaacaggtccgaacgggtgagctgcacttgctagtccaggagcaggaccgccgttacctgcgccaccacctgccgacgcattggcaaccacgcctgcactcgagcggcgagccacgaagaacaacaggcggaacatcagccgatacagccacgctaggtccagtcgcagcagctccagcttctcaagttgctggacgtcgaagtgtccgttagcaagcagttcacgaaccacctcaacctggtcgaacgccaccgccacatgcaacgggttgcgttgtccacgagcgaatagcgccattcctcccagcttccagacgtgcggctcgtaccactcggtagcaaactctgggccagagatactaaccgctgtttccaagagcgaccgcacttgttcaacatctccacgctttgccgcgctgtacagtccaaccttcacgtagtgcacttgccttctcgtactgcccacgggggccgatccagcgtcactttgcccgtcctgtgtgccgccatatcgattgcctcgcgcagcattacgcagccgcttacatcgccgccaacacgcccacacaggcgctggaagccacgcgtacagcggcgtggcgaatgaccgctctacatagtcgaagcgtgaatgacctggtacgtagccccgctggaacagaaaatgctggtgaatacggtggaagagcagaatctgtcgccaccgcaatagataggcaagaactgccacgagctggacacctaacagcaccaggaaatagcccgtggcgagttgccggtcgcacgcgctcatcatatccgacacgctgctggagtccgacagcacaaatatcgctatcagtatgtagatgaggtaggggatctccaccaccacgatcagttcacagagcgtgaacaagtacgtcttctcgaagcgctggtgctccttggtgatatccgcgactgaagaggacggcaccacgaccgccgaggggtccgcgctgctggacgacgtggagctcactgtcgagtagtccctgcgcgcgcgtcggtagagtctgcaggccttgaagttgagcgccgggagacacagcagcacgttggccacgagcgagtacgcgtacatgtcgaggaactcgaccgagtggtcgtggcaatgcacctgcgcgtcggcccccgcgccgtcgtccttgtgcttgaggatggccggcaccacgacgtggttgagcagctcccgcaataaatagacggccacgatgagcgtcgagttggccaccatgcgtgcgcacaggtacgtgttgctgtcgcgcttgagccacggaaacacgcaccacagcacgcggcgtatcctcatgtagcaccaccagagcttgcggatgcgcagctggccactcgcgtccacgtagtagttgcccgacggcagcgccgcattgccgccacactgggcgttgatattgtcggccaggcccgtcacgtccgcgttgcagctgcccgagtgctgctccgtcgtggagccgttggacggccgcgacgagtgcgcggacacggcggagggcgccgcgcgtcggtgccagtgggtggtcgtggcctccgagtgcctcgagccgtgcgtgcgccccgcggagctggcggacgccgcaatgtggccggcgggcggcgcctccaacccgccgagcggctgcgactgcgcgcgccaccgccggccgctggcggacagcggagagcgcagcgcgtggaagtagctggccacgcccgacggttgcgcctgttgctgctgatgttgctggagcgccgcgctggaggacgagcgcgacgacgcggcggacgagttggcgttgctgctgacgctgtgctccgagcggcgcagcgcggagagctccgggtccgccatggcgcggtcggcggtagggcagtcgcagtgcttatgtgttgtgttgctggtcgcggcaataatagaactggatgttgcgcccgattacgcggctttgatgcgctctttaacgcgcgtaacgaccaatcaggagaggatttacttccgctacaggactgtattatctttcggcaatcagaaggaaatggcggcggagcgtaagtaaagtaaattacgagggtgtgtgtgcgcgtcgaggaggaatagctgacgaggggcggggtgtgatttactagcggctattgatgcggggctgcagcagctgcagctgggcgacgagggcctgcgcgtgatcgacctgcccggctcgctgctggaccagagctacctggtgcagatctggctgctcagcaactgcgtcttcgtctggatgggctcggcggccgacaagccgcggctcgggtgcgtttgctgatggaactatcacaaaatgttatcatattattttttaatacagttcgttgacgcagctcgctgtcgacggccatcgcgacgcgctacagccccatgccgctcatcacgtccatcgtgggcgccccggagatggaggagcagcagatcgcgcagagactcgcgaggcgcacggggaggcagtgcttcgtgtcgtgccagctgccggaccacgtccccgagctcttcgcgtacgttgagaagcagatcaccaagaggctgacggaggaagggatcgtggtcaagaagtgagctcttcacacgagcttaaagatctgcaccaagtacatattctacaagaatggtatttttttattgtagacgggcaatgttgtagaccgtgagagtaggaaagctgctcgcttcacgtcccggagtgtgcccgacactccgacactggggagaggggattcgtgattgttgctgttcataaatactgggttgcgaaactctgctatcacctagcttgactgctcggaaaacacccagggcatcatcatactgcagaatggcggcgcgcttgtgcgatgagctggaaattgaaccagcaaactattggtaagtagaactcgctggtcaacatgagtgtttttgcctttcagattctagcataaaccttttgtgttgacgccggtcatcattctcgtttttgtgatgatactattcaaatcaactcaagtatgagggactatcgaaatacaactcccgcatctcacggccacatcccaagcgagctgaccgaaggaaacccgcctccggacagaaacaacgctacggacatgagctcttcgtcatgccggagtcggtccaacaacacctgcatttgctcgcgagcgtccgaaacggtggcaagcgagtcgaaccacacgaacaaccgatagtccgcactgcacatgccgacaaagaggcccgagtcgctgcgttcgtataccatacgcgctgcggtggcttcttgcagcgactgtaggcgcttgcccagcacttggctctcacgattttgaggctccgccggcgtcgggaacataagatggtgtaccttagcgtactggttcagcaactgtaaccgagtgctgaagtccccgtcaccaaacgggaatgtcagctcgggctcagcgcactcacctgtgagctcgttcttgtagataaaatggtatagcagcggcaaatcgctgtgcggttgccactccgagtggttcttcaccgaagcgtcgatagcttccattgctccaatctcctcaagtcgcagcttcacgaactccttcttcgcttgaaaatgcgggaactgctccggcgactgctggctgctcagtagcaacagacaaacgtcgctcgtcaagaaaaccacgtacgcgtatagaaatcctctacaagaatcaacatgaaaaaaatgttagaaggccaactattgtagcaatacacaaaagaaaaagttatagtaccgagcattgaaattcgacaagcagatcggtgtccaagtctccgacttctccagcgacggcgtgtgatacacgaaatttaccaacaacagcaaatctacaataaagcacacacccaccaattcaattcctcgtcatcactaaattgccaaagaaagaaaactttaccatccacgagcatgctgaattgcttcttgttgggctgcgcaacagccaccaccttctccttggcgagtaataacccgcagatcatagtcgtcgttgatgccgctgctgcattctccctgggggcttcaaactccaacgccctcgcgacttctcgccgcctctcgggcttgagccgcacgaacggcacgccgcagtccttgaaccgcaagctcggcgtcgacgcccagagctccgtgagcgacctcgtgactctctccgtgccgttgagcagctcgcgcaggtcgtagcctggctggcggcgcagcacgtcgagcccgcggtcgctcagcacgaacaggatctggtgctgcagcagccgcagcagatgctgcagacattccgacgcaaagctgggcgtctcgctgctgtggacaccagtcgtagtgtccttgtggacagcgcgctcgatggccgcgaacgtgaggctgtccgagctgaggaacacgcagcggcagtcggcggcctgcagctcccgcagctcctcgtgctgcgtgcaggccacgaaggacagcaggccctgcagcgagctcgcgaaggagctggtggacgagtcgtcctcttcagatggacggttggtatcggatgcggacagcttgtggcggaagacgggcttgccggaggtcgagcacaccaggacgtccagctccattatcgcgcagtactacagttggcttcatcgtgaatacgtagtaccgcgatgttggatcagtgctcctgatcgatattaataagaacttacaatacgtatcgtttcaataggttgcgagacacagtagcctgttgctagtttccatgccaaacagaagtttatttgttctaaacaggttttcgataccacggtactttcgaatcctggaaaaagatcgatcgaaagatcgattgatttgccatgaacaaagtggtgattggtttgctgtggcttggagtcgccctagtatctgcagccacttcacgtccagctccaaggcttgaggtcacgttcccgacgcagcactcgtggtggcaggtgtcgaacgacgacgggttattggcggatttgcccgtgtacttccagacccataacttcaagatcccccgtgacggattcctgttcgtgacgggggacagcgtgcctgaggaaggctatcgacaaacggcagcggtcaactcagttgtgctcggcggtatcgacccaggcacgcacttctggaagttggagctccgatcgtggagtgacagcagtgttgctgtcgcagaggcaacactgcacgtagaagttgtggtgaacccttcggacgagcgttcgccgtggaaatatacactgcaggaacaagagaggaggccactcgtgtttgttaacgctaaatctcaacaggattcaattgctgaggtgttgccggtgtgctacgtatcgtcgacgtctggagccttcgacggtcagcggagaatgtggctgcagatcatggaagggcttcgtggggagaagaataacaacacggtcgagttccagtttgaggtgaagacctttgagcaagtggtgaccaatgcaccactgacgagggcattgcagcgattgaacgtcaatcttcaaggacttccgttggaggtgagtgcgcgcagaatatccgaaatgtagtgaaacgaggctaatttgtggattgctcttgtagatatttctgaatgagctatctgatgaagacacgtctcctgacggagtgatcaatgctctgcttgcgagcttctatcgacgatttccttgggcaagacacgattcccggcagatttcgaagctggaccagcctgatcttcgtcggcttgatccgccatacgctgctcgagtgtggacagacctggtcaatgcgctaagctctccgtgcgccgatggactcatcattttctcgaactcgcgcaggatttcggacgaactgctggttcttgcggcccggcttgccgggccccgagctattataatggagcttgcgaacctccatcccactaaagttgatgtggatttcctgctggcaccttcacattttgcgagagaccactactccatctcaagaaatatacgagcccgccacaaagtggtgctcgcaactggagtaaacactcggcaatttacaccagctacagccccgccttccgacgaacagacctttgtcatcgggtatgtcgggcgactcgcacccgaaaaatctttaggaattctgttggccgcaatgaagattcttgggccaatctgttctcgatgccgcctgctaattgttggagatggcccacaaaaacttcagctccagtctattgcctctgagtggggattgcttggcactagcgttgagtttgtgggtggaatatataacgacgagcaagcgttggtgtgccagctccgtgagatgcacgtatttgcgagcccaatgttcacggaaacgctaggactagccgtgctggaagctatgagcgtggagctgcctgttgtgggcttcatttcaggtgggacgggggagtttctccacgacggcgtcaattgcagagctgtcactaaagctacagccgcagcattcgctgatgctctacttacgctcgcccatgacagcgagatgcggattcatcttggcagacaagcccgacacactgttgtagaacgcttctcaactcacaaagcgctgaagcaatactcgaagctatacgaacgcgctggccgaccacttcctaaacgtgttagcactcaggaaagccatactcaagatgaatgcacaacgtgcacaggagaattttgtggattagatacctagataattgcctaaaagcgcgtgctactgctaccattgttgctgtacgccagcgggagcttggtgggcgactcgtcctttgatcggatgacctttttcgccttccccttttgactcacaagcgtcttgataccagcagacttgccaccgctccgagaattgttgatattgggaagggagatgccgtccccacgggtcccggctgtgcgaatcttgctggccatgttgcgcttcgcactgagtaacgagttctgcaacgtgattacaataccgtgcgactcaccgagatacgtcgatgtgatctccatgcctttcttgtaggactgcaggctaagatcccagcacttgagaaactcctgctcgacaccgacattgtggtaggcaatgcccagaactgcaacacgatccagcttgatgctcgggtcaacgtggtccccagatttcccaccgaagcctttgcgtgctgggcttgatccgccattccctgctcgacctaaatgcagttcctcgtgtaggaagataagtgccgactgtgcatggcccagcgcgctctgatgcttgccgagctgcgagagcactgcgcacatattgaggtgcgtgtccgctttgtttggtaggttatcgagtcgcgactcaatcttgagcgcctcattcaaatatgtaagtgccttgtgcagatttccctgtcgacgatagtagcacgccaggttattcagcgtcacagctcgtcctgccgggtgtcgctccgtcagaatttctgccttcttcaacagctcgagcaccacgcggaactcctcctgttgcaggtaggtcatggccagcaggttgcacatttcgcccacggttcgacacgaagcccacacttcattgctgtcggcaccgaagaagtgctgtctcaacacgagccccttctccatgtactccaacgcttccgtgtacctcccttcttgctgcaattgggcacatttgtcatcgagccgctggagcgccaccagctccttctggttctcaatgaagtgcgtctcctccaattgctccagctcactgagacgcttcgatggcgatggagatgccctggcaggctccaccgattccttgacttcggtagcagtatccgtctgaggagtgggcatttcttcttcgctcacttccgcgtctgctacatccaagtgctcattgtttccatcgtcactaagaaccggtgaattctcctcctccattgtaagcccaggtgaacgctaatgcaatgcagtggagtggtctgctaatatactttgcccagcgagcttttcgtgtagccatttttagaacatggctacatactccgaatacaaggtcgtccagtcgaatggctctgctggacgatcgcagcgcagaatcaacaagagcgccgactgcaaagactgcggcctctgcggcctctgagccaacacagcggcaatgggtgcggctcctcgcagcgatgccagcgccatggtccagcagcaacagcagcaactacagcatcaggagcaggtcactgcagacgccagcacgtgtcaagacacgggagaccagcagcgccaggagcaggaacaggaacaggaagagcatgcgacaacgatcgtcccgttgcgcgtacgagtcgacgacgcctcgcagcgcgagactctgctggagttcgagtgcgactgggcgccgggcatcggcggctccgtctggaccagcggcgagctgctggccgcgcacctcgagctgcagcgcgagcactaccgctccatcttcgatggcgcgcgcgtggtggagctgggcagcggcacgggctacgtggggctcatgatcgccgcctgcttcaagccgtcgcacgtgtacctcacagacctgcagacgcacatccaggggctgcagcgcaacgtcgagcgcaacgcgggcgcgctgcgtccgggcgtgcaggtgcacgtgtcggagctgagctggggctcgtcagagcaggagacgagtctgctggaatccgtcgccgcgacgtccgaggacattgaagctggaaaggttgatgtcatcctgggcacggacgtcgcctacctccgcgagctctacgaccccttgctgcacacgatgagccgcttggcgaccaagcgcacgctcatcctgctgggtctcaaccgcgcggacacgcagcttacgttcttccggcagctcgagctcgacggcttcgagttctacaagatcccggacttcaagctgccgcaggagtactggggccgcgactttggactgttcgagatccgccgctgcagccgcctctgagccggagcattgccaacccacactgcaacttcactcacaccgtggcaactataaccacggaggtatccgcccttatagattctgtaccaaaatctaatagacaccatatagacacgagttactgctgttaccgtcagcttggtgtcggcatccgccaggtccgcgtgacgcggccgctgctgctgctgttgccgcggaagtggagccatctgggctgtccacgcggacgcaagggacaagcgtgcgacaacctaacggttgaaccttcacttttcgcaaagatcggtttccacaccgcaatgcccccacagccggccgctgccgcaaaattggcggcggccccttcaaggacacttcaagacgcagcgcagcgcacaagttgcagtgcatgcggcctcgagagtgggaactgtgtggcgtgaacaagctcaattgagctgatcagctgcgctctcgggcgcgatcggaggcggggctcacgctacaacacgacggcaggattcaccccctccgcggccaacccgcccacactgcgcccggtgccatgacacccgtcccggtggatacttgcgcgcgagttccgcgcatcacgccttccctcgcgctggctgccatctccttgcagcccggcagcagagactgcccatgttccgtcgtgcccggcttcggcgcgcgggcccgcggcagcttgcaagtgggggcgggggggggggggcgaagcagcgcggaccaggtcgacacgccacttgggaagcccatttctcccaaaattgacttgacgaccgcattttctttggcgttttcgatcgcaaaaacgtaactgtcagtgaatacgccagaaagtgtatcttttccgactccccttcaatcgcacttagcagggtgagtatttgaatttgccaaaaggatggtactattcaacgtggggaaaggtgatggtactgtactatcctgcagcaacaaactggtataacacgcgttatattggcgtgtggcagcaagcctgcaagctacaaatgaatcaatccactctcgatattttggtttggttgaagtattgttgcttcaatatcttggctcaattggaacatgaccgtcatcgactacatgttagtactattgtagtagtacactttgtcgctccatgtcatcgtgaagtgcaatgttgattcaatagaattatgtaccagtagtcagcctcagctggttaggacccagtgagcgacgagcataatatggctcaacctcttttagcctagctagccactgctatcgacgtacagtaattctccgatggataccgcagttgcctcagaatgcatatagataggatagcaagcagcgcgttagtgctgcggcaacgcgatactgttcgatcagcgctgtcgcgtatcagcctcgaatccgaacccgagtggtttagcgctactttttgtcatgttggtagtcgaccgtgccaacctttggtaagtaccacccgcttcgccaaaggttgcgactttacggggcacacaaaattccggctacacaaaaacggccttgccaattgcccggacccggagagctcagaaggaatcgcgccacagcagcagcaggtcgattagggcggcaggttgaagcacccgccactctcatgagcagcagctccgtcccgacgagcgcccccagctcgtggcagaagcgcgtggggacccagaggcagcaggccaacagcaagctcggctcgtggttcgtgagcaagttcgtgggcggcaagagcaaaggcaagctgctgcaggacgaggagacggcgcagacccagcggcggcggcccgtgggcacgctcagcgccgtgaccaaccagcagcaggccaacgccgcgcgccgcgaggagctggggcgccccaagcccatgcgtcagaagagctttttgcgccagcagctgcaggagatgaagcgccagtcggccgaggccctgctgcgcgcgcagaagcgcatggacggccaagtgctggaggaggagaacgagaacgatctggaggagaagtcctcctcatcatcttcttcttcttcggacgaggagggagaggacgacgacgaaagagttcgcgtcattgacgaccccgacgacgtgctgcgcggcagtctgagcagcaacccggcgcgctcgcgctgctcgtcgtccaggaggtccagcacctcgtcgcgtcgtcgcagcgcggccgaggagcagcaggagcgcgaggacgagatcttggcccacgagacccagcgagacgagtactcggccgaggtgaatcgccgcatgagccaggccacgcagctctacgccgaggccatcagcgcgctcgactacgcgctgcacccggagcggcagccggacatcgagccgtctccgaagccgctactgctgggcgtgaagaaggggagtgccaatatgcccaaaagtgagtggatttgatggaaatcttcgacagcacaagaagaagcaacaaaaagtttttgggagacgaccagactggcggaggaaggcagtttggagcacgtcaagaaggagagagaagagtataacggagggaagggaggggggaggacaagcggcggtgtatatcaagaattcttcgccaaagaggaggacgtagcagtagtttggtataaaaggcgacgggcgatattttatttttttgacaagcaagtacttaggaagagcactaactacagtagtaagagagtatgaacggtgaatagcaagcgatggagctacgtacgtgcgtttgtttttccgttttgtcgttgttgtgttttaggattagtcaagacgacgagcgggagaacgcgacgaagtgcggatcttcgagcgggtgattttccacacgatcaaagccgtcgaatgtcaatttgtctgtcttcatctctgcgaaggcttggcgttggatcttgacgtcgaatggcagatagctattatagaaaatataccgttccgtacacatcagaacaatcgaaaaacaatgtttttttgtcagcaaagtggactgcgaaatgtgccaagacattagtacagcaataatacgaacgcgcgtgctgtacgtacatgagttccaacgacggcgtggcatcgaacgcgtgctcgttgacgactgccactgggttcaagtctagatgcctgcaatagtgagtgcagcagcggccagaacgtcgtgagtcaacgtgccaaagagcatcaaagtggagttcgtgttgcgcatcgccttacagcactttgagttgcgtcagagcggctgtctgcttggtgaacgcaccctcgctatccaccacgtagccgaggaacatttcgggcaccaccttggtgaacttgttccccgagagatccctgtcagttcagcccaacgccccacatgagatgaggcctagggtccagttgtgctgcccagcgctgttacgcgctgcttgactaacttcgtacaagtgcgtggtggttaccgggatgttgatcggcacttcctgcggcattatatagcaaaggggtcagccagcatatcggccgcgtactggccacgaaagcgcagaatctcacctcaagcccgcggaagtcgcagtagacggagacgcgcgcctggccgatgcattggcacttcgccgggcagcccagcgcaacgtcccgcagcagcgcgagcaaagccaaagacgcaactctccacaacatcgcaaaaggcagccttcaaagatcgactttcaagcgtcgcggagcccgatccgaggggggaatgtggcatactggactcaattgacgtcgcgctctgcatggtttggccgacgcaagtgatatttgctggtcgatgacctggattaaaggcgaaagtttaggcccgctcgcttggcggagcgcacgccaacgaccgacgccagcctcggggctcgtctagcgcctgacgcagcgtccggctattactttgcagtcgccgcaaatattgcgagcgcttcgagtggcgaggcattggagctttcggtccggtaaccgatggctgcttcctgcgctcctgcctggaaaaccgccctcttcgctgtctcatggcgctgtgaattttgcgctgagaggctcatcttcagctgcagattcatcccaaatacatgctcaatgcaatgcccacggcctcgcaggcgttttgagcggttagtcagcgtagcgcgggacgagaacgagcgcgctcgtcacctctctttctcttccgtgtttgcaacgcttgaagtccgccgccacggggccagctcgagcgcggggggtatgatcatgctgtcttcccagaatttctccgtccagtaaccgtgcgtccttttgtgggggcgcctctcagttgtgaccgatgacccgtgttccgcgtgctgtagcaagggctggacccgaccgaccccaacccactccattcggccttttgcgagccttcgcgcacgtccccggccgcacctcgaacgataaataaaaaactacaatgcaaacccccatcaaggcagctgtggtgcatccggtcacgacgtatcgctggacaggcagctggaagcccacgggcgaggctcaccgcaacctcagcgttagcgtcacgtgcgcgccggaggaccctcgccaccgccggatgtcctggaacggggccgctaccaggggcgacgacgacgacgactgcgactacccgcggcggccgaagacctcccgagcgcactccatggtggcctcacccacgcgcgtgcggttcatctacgaggacgaggacgccaaggcgcgcgtgtgcggcaacgtggaacgcctgctcaacgtcgtgcagaaagaccccgaagcgatgacaaccaacgcgcgggtggcgcgcaaggtgctcaagtaccgccgggtcatggggaggctcgacgacgtgaacgtggaggaccccgacttcgacgcgtccgcgttcttcggcatcgagtggtgccgcgtgggtgccccctcaagttgaagtgggtcgagccgaccaaccgttcatgttgaagttgtccgtcgtccaacccttcgcgctgccaaatgcatcgcacacttccagcgatcacgagggagcagacagacaacatacttgtgagagacttcccgatcgattgatgagaccgccgacgggagtacctattagcttgccacaccgcgtattttatagttttatagtatccagcagaggtcggaaaaacaatattgcaatacagtaaataattgagttttccaataaaaatctttattattggacgaccccggttccaatacaatatcctattgacccaattattgacaataaatatgataaaagtccgctggcaatgccagcctggaatgggatttacgactgatgatgctaagttctgatcgctagaggcgtggaacacttagttaaaccgagtagcggctgcatgaagtatttacctgagctataaaagttcggtttaccattggtgagctcgtcgacagaaagcaggtttaagcgaactgacaggtcaccagtctctatcataatactgcgaacatgaaacttgctactacgcgtggattgaacctcaggtgagcttcacagtggaaccttcactgctataagcttgaatatcaacacaatttatgatactgaactgtttgtttcgatgttgtgcccacgttcccccctctaaatcgataaaataggatgttctatgctccaatgcaatataaattatgggcaaaatgtattattgtttgtcaaagaattgtaatatttattagggcttgacaatgatctcaatacaatataatacggtattggcggactctggtatccaggaccatccaggagcagaggccgaatataattgtatgtcactcctcaattagtttttgagtggtttcgtttgactttgactcgtgcaacactgtttactgtatctgtttgttggctacgcagtgctgccctgtagatgaataacatgcagtggcatgtacgcgcaacagatttaatgttgtgggggcatggatacaagtgcagcacaatttctatggcagtcgtaggtaccaggggcgagccccagtgtctacaagcccgacaacggatcggcttttcggttgttaccacacgaacactgcggacagggcatactttcgcatgcagggtgagcccctgcgaaacgctcgactggccttcatggacgaagtaggcctataatacgtgtacgctaggctgccgtcaagtcgacgaaggaatggagcagcttcaacctgcttatgtcatgtaaaaccagcactattggtgattgaccagtttgccgacttcaactgccacgcctgtacaggtgacagcaacgcgcgcggtgggtgcgcttacatatactctacagcaacgtgactccgttgaactaatattggggaggagcctaccgtggagtgatcccatgtcgtcggtgcggagccctcttttttcgaaaagccccacgtagcgcgttacttacgtgcactgtgcccgcgtgcggctccgatgcctcaacacgactcgggcaacatgttgaggtgcccgttcacaaccaagcaggctgcagcgccaaccaacaggctggttcttcgcctcttttgcgccttgtgagtcacattggtacacgttctcgttcactgcctgccggcacaagatttgcacccacgcttcatgcctccggtcggtcgatggcagtggtggcccgattaggagtctgcgtgccctcctcagtgcccgttcgtcgcagcatgggggatgaaaaggtgagtcgtcttcgttgatttttgcagcgcgcgccgttccaattcggcatcatcggtcgcctcggtcgaccgcgggcgcgcgagttgctgcttggccgctcgctgcgcattacacaccacaatgtcgctttgtgcaagtcaccgcgccacgtcaaagagggagatgcgtaaaatatctctaaaaaatatccctacgatcggacttccatcgcacttcaacgtacactgtcagaaaaagactcgagtatggtagacgtcaagtatttttttaggcaaaagcgcttttcaagctgtaaggggcgagctatttcaatcgttgccaagatcctcactatcatagtgctgaaggcctacagtcatacacccctcccgcgttttgcgtaaggtgttgctggcaacaacaacgtattgctttgagtcgagtacgcaatccgctggccggtttctgctgctgtgaatcacgcgctccggcagcacgatgccatttacgcacgggccgtctcccccctctggacgcaaagcgtcaaagctacatccttcaaccccgagcatgtcaatgcgctcgagggtgcaatgtgtgttgtgtggagctacaacggttcgagagacgctcgaaaacatccgcaactcagtggatttctgcgtggtagcgatcctcatggtcaacagaagtgtagtgtacaacgctgtaggtgtcaaatgtgcagccaagctgagggcttagagttttgtgtcggccggcgagatgcttgcgtcgcttcactcaccatcaaggtggcgagtgccgatccccaccgccgctggcggtccgccagcaagaaaaggacggagaggacagcgtcgtgctgaaggacagggcggacctcagcgatgtgagagagggtcgccccttccttcctcatttgcagttgcgagctgtccgacgaagctcgccaagttggcagaagtaccgccagcccgcctgccatccctctgctctctctctccactgcaatttgcattccctctctccaagcggagcggtccacccttgagtcctggacagcgactttcctccccattcgcaatcgcggcagctcggagcagcgacttcggtgtgggacaccactgggaagacgcagcacgagcggaagacaacaagcggacgcaagcacatcaacacgccagcggatcccactactagcgagaaggagtacagtgccgacttctctcctgacttgagatcgctcattccgacatctatcccgggtagatacaagctcactgctggccggccgggcttggtagttccgcggccactaccctccaaccgcttccgctagacggccccggacgcctggctcgccattgatagtcgacctgttcgggtgaccgactactcgcccaacttcattacttcttcccctgcgcaccgaaggtctaaacgcgctcgtccgcccgcgcgcgtagttatcgtgaatgcctgcgtcggttgagacctattccagcaaggacatcgacatcgcgccccccccaccagcgttatcagacactaccgcggcatgggacccacgggcgactcgaaagaggaatcccgtcgacgccgacgccggagacccggtgaatcggtcttggaccacgcggagaatagcggagaccacgccccaattgaccgtggatcatctacccgttccgaggccgccgacgtaacttcactcgagcagcggcagcagcagcagcagcagcattctccactcgctcgtggcgccaccgccaccgccagcgctgccgcgtctttagtcgaggcgacggccagctcggacacccggcgacacaccggcaaacgccgagcctcgggcgagatgatccaccacgaggaagaatccaaagcgatgcagccggtcacgccgcagaccgggaacgagattcgccgtccagatcttccagagcgggcgatctcttcgacagcagagcactccgacgctgtccgcgcagctccggaccaatctgtgttgcaagcagcagcacaaggaaacgagccgcatgaaccggctgtcggtgaggcacacacgccgcccgtggccttgcgagtgtcaactcgacgcactacgacgacaacgagatggtctccttccatggctggcggccgtgagcagccctctaggtcgagggctcaacgatctcgcggttccgcgacatctggcttggcggtggcgccacccgctcggccaatctcaaatgctacgcgcaatatcacgttcagcatgttacagccgcacttcgagcggccgctacagcaggcggccgacagcttcggcgtgtgcacgacactgctcaagaaaatctgccggcgcaatggcatcagcaactggccgtaccgcaagatctgcggactgcgcaagagcatcgcgtccatggccaagcaagtcaactactttgacggcgagcagaagcgcgcgtacgctgatcagttagagaagctccagcacgagctgcagtcataccttcgcacaggaaacgagcccacggaagagttcctccgagcgctcagctcagaggctgctagcgccgctgcacgacccgcttcggacacaacagaagttggcaacgaggaggaggaggaggaggaggaggaggaggaggaggaggaggaggagaaggaagcgcgagaggtgcccacatggacgactagacccagcattacacagcctcagctttcaaacccgcacatcatccagagcccacccgcaattcagtcacaacacacaacacacaccgcgatcacggcggcatggggaggcatgcacccgcagccgcaggggccgccactgcaagcgcccgtgtttcctaccatcgcgacacatcaccgcgcactgccgtcgatcgcgtccattctgcagcaccagagctactcgagtccgagtcgagcggcctcgacgagaacggcgccagtatccgcgcagtacgtggacggccagctacaacaaccacagtggcgatactttcctcctacaagcgatgatgctgtataatggtgtaggtggatgtagcgcagatagtgcgggaagcactcgtagaagaataaacagcgtgttgtcagaggcaaatggtcgagattgaaggtggacgtccacttccggaggactattgcgatcctagatcaatgggtggacaagtgagacgggcttgacacggaaggacgcaatgacaccaccggcaacctgactcacgacctcaaggatctgaccgtgacgtgattgcaccttgtcaactggtaacttgtccacgagctgtcagcgtgactgcgccatggtgctttggttcgtcgtagggatcaactgagcaaagttggctctttggcttatacgtacatgcataatgttcagtcactgtttggtgaggagaaatgggatcacctcagaatatatcgctaaaataacgaggattgaagccaatcattaccacaatgaccgcaatccgtctccctcgggggacgatatgcaaggcatgtgcatgcgtgcaggttcttgcgtgcttcgcgtaagttatatacatgcacatgtaccacgtatcgcagtgcagtcttcgaagaagccaggcaaagagcattttgggttttagcgtcgagcagagcttacaccagatattacaataattggacatgcacgactatactgtactgtaggggaccagcgagcttgatgtcggatcacagtagagcgagctctacggcaagagtaaacagcattcctacagcgctgatgaagccgtgtacatgttcagctgacgagccacgtcaatttggcggctaaatgggtcatttgagatggcagcgtgggcaggtggtggtttgaagcgctgccgtccataagccgcttcgggccgcatcatgcagtgcggattgcgagcccgccacttgcggcgcgtccgatttgcacgctacgcgcgtgccggtgcctttcactgatgccgaggacgcatcggatgctgtgggccatcctcgggatccgctcgcgtccgtatcggagcggagcccagcctggtctgcagtggagcgcctctgctgcgctgcctcgacgctcgcgtggccttgcgccgtctcccaggatacgcagttgaagaaggtaaacgccgcaaatgttgtcgcggaggccgctcgcgcggtctatcgcgcgcgggcgggcacctgcccactgcaacgcagacgacggagcccgcagcctgcgacggcagatcacgagcttctccctcgcgggcggccggccagccagaccctggccggccactggccgggtcacatcctgcgaatcgatgcacgatggcacctgcgcctccgccctcgcttgtccctgcgttccggcgctgacctgccgtaaaaaatggaagtgcgcggccttggtcgtgtcagggccaaccagtctctacaactacagctccatttgcatttggcggcgcacgcccaagagcacgagaagcagagagcttggcgagcttcttacccgcctccgcctccttccagcactttcaacgtcatcttgctagagcttgtcggtcaaactggacacttctggccttacttggcgctggtctcgacatcaccggcagtggcgccgagtccacttgtgtacttaagtagcctggttaactaacaaacgacatgcctgcatacagtggagctcgagcgccccgcggagaagcagtcgacagttgcctggttaattcagctcaatgaagcccagcctgcgcggtgtgcgtctgctgctagcctgccgcgagcttcgatgcgaagacgcgtgaccgcaagcgttgcggtcctcatccgcagcatgttccgcatccgtcgcgacatcgaaggagtaggtgcaggagggatgataatgacgcgacagtgtttagcatcttaaataagtgagcctaagtacagtctacccgaagagattaagcgactttgtgtgtgccatgcactcgattagaaccgagtatggtcgtaaaatactgagtgacttcggaaatatcaaatctccgttgctttgttgctttccccaccatttcactttgcaacgaaccaaatcactgagtgggcacaaatacaacaacgaatttcgcaatagatcacctgctcggtttgagttctaatggcctcgccttggcccgaccgcgccgcaacttgcgtccctgtctgcggtgaggatccacccgcagaagacgaactgggcaaagaccggagcacgggctgcagccgtggaacagagcaccgagctgcaggcgtgagcttggcgcgacaagacggccatggcatcacgcgtgggtggactaagccatttcgtcacctccttcgaagcttggctgcacgaagcagccatgcatgcctctctgctccatgctcaatgctcaatgcttttaagcttttaaaaatgttggcgccaatgtgcacttctggatgcagcctccgtcgcacatccactatacccaagcactcatcacgctgcagcggtggacctcgtcgcggtcgcactcgcgtggtacgcaagagaggtcctcaagagctcctgcttcagctcggtacggtaggtgtatcagcagtaaaaagaaacggcgtcgagcttctcgacccgaccccatccagctgcgtgcctggaaccggaggctccattcctgaatctgcccggccgccgccaagtcgaccgtgtgtcgatcacgcgcggcgctcctcaaaccgcgtagtccgccgaagcgagaagaagcaagcccaagccgcccattgtccgactgtccgatcccgcgtgaagctctttgaagtaaagtctccgcgcgatagataggtacaaccagacacttcttgtcaccagcgccagcacggtgctgagcaccccatcgagttcctccttctcgagcgctcggtgctttacgcaatcccatcgactccagaaaacggagctcgcagcatacccttgtcctctcttcggacagacgcagcgaccggactcaacgcaagtctccacttcaaatccgacactcggcgccagtcatccacgccagcaacgcgcagccatctgccccagtccgacaacctgcagttggcgtgtcgtcactcatctttcgttttacgcgctcgccgccaagtgatcgagccaagcttccagtcccaaatggaggccttcgcactcccaaaagacaccgccatcgccccaatggcctccgacctgccgccactacagcacaagcgccagctttcaagccccacggccaccgccgccggatcgcccgtcaacatgacagtcaagaggcgcagactgtcggagcccgtctcatcgccggggtcgcccgtgtcggcgtgctccgagacgccgtcgtccaagactcgtcccaacatgacggcttcaagcagcatcacgctggccatgctgcggccgcacttcgaagagccgctggccaaggtggctgccaacttcggcatctgcgtgacgctcctgaagaagatctgccggcgacacggcatcgcgcgctggccgcaccgccagatcacgggcctgcgcaagagcatcgcgtccatggagcatgccatcggctacttcgacggcgagcggcgcgagtcgtacgccgagcagttgctcaagcagaagaacaagctggccgcgctgctggaagatccgaccacgagcaacccgctgctggcctcggacgaggaccaagccacaatggttgcaaggcagaccaaggttccgtcggtgcagcctgatatcggctacgaggtgccacctgcacatgtgacccgcgcgtcgtcgcctacgggtccgttgctggtagattatccctactacggtgcatcgtccgcggcggtcccagtgcagtcttcgccgatgtggctcccggccgaaccgagctacacccagaagtaccaccagctctacccgccgccgaagctccagcagtctcgaccggagatctactctactacaagctacaacgtgcccggtgcagtcccttcaagcagcggtgcttcatcgccgccgatttatctgcctccgctgcggcgggagacgcggtcgttgttgccgcctatttcgtcattggtggttagcggcagcaacggaattaacccctacaaaccgggaaaaaaaagtcattcttatactgcatatgcagtttaattagacttggcatttgtatgcaatgggctaggcgagggcgaggggaattatcctgagatgagagttcggtgagaaggcagttttagcaccggcggttctaaaactgccttatcctgcattcttattttcaaagatgactctttatgctgcatacaacagcattatcacgaaagggacgaggcagccctcgaacagaacctgagcacaccccgcttgggtgcagcgcggtttctctaaaaatcggaaaatgaaacttcccatacaaagatgcatatacaaaggtggggggggtcgcctctacaacgtaacgcaatcacttgattgccagctacttgttgtttgcaccatacaaaatctgagtgagctagatatccaaatatttccctggtaaccatacatcttgaaacggttgtaaaacggactgccaagatggtgcttgggatgtgaccgagcgcagacaaggtaggcaggatgcaaaacgagatgagcacgggagtagacaggtacaatataaaaagcgaattgtacacacgattgcgcttatgcaaacgattggtgatgcaaacagacttatcctgcacatattcagcataacgacacgataatatgcagcttaactcctactggcttgtccggcgtctcttgtgcgatgctggcgttgcaggcgttcccggtgttgatggcgcagcctcagagtcttcgtacgaatccgaatcactttaccattgtccatggggaccagcttgccgttcatccattctttatgccagatatcccagcacgtcattgctacatctcggactttgcggcgcgctcgcatacacaggtaaatcgggcctgttctgttgcagtcgctgcagaagtaggtagtcgtggaagcgcgctgggcgccggagcgaaggatggagcagaccttgcacgtccgctggcgacgttttgcctgagagccttggtttctccactcatcactttgacgcgcagtatgcttggtagatgcctgggtgctgctggtcgataggggagtataggccagttgggtggcttggcgccgcgttccaaaagtattcccttcatacatgtccgatgcttgcagctggcatagctgcaagtgcagcaacttcatgtacttgacgtgagtaagcggccgtgactccttgtttttgtgaaacgccttatgcacaatgtacccattcacgatagccaggtctatcaatcccagcaccaacgacttgtagtacttgcgaaatcgtagagcgcgttgtagagaatatcgttgcagtcgcagctggtcatggacgtccacgccgcccatgaaggcgtggtagtccttgatcaccctcgggcacgggacctcgactttctcagaccgatcttgcctcacgacgcgatcaatctcgacgctgccaccagtacacagaaagtgtacggggcgcgaatcccaccagcttattgccgtcatgttcggcaccacacgagatctggccactttgaaggatcctcgagcaatggagtcgggcctgctcttcttcttcttctcaatcacttgtttgcaatacccaagtcgattcgtcatgattgtcccaacgcaataaaaacccatcagcagtagctggatcgcaagcgcaactgaagtatagaagcggtcaaccaccacgagctgcattccttgcttcctggcattccgaccaaacacttccagcaagttccgcactacggcggcgggacaggtcttcatatccggcttgtgtacatcacttgcgtgctgctttttgccgcaatagacctcaaaactgtcgatatgcagcataagtaaaacagaattagtcagcctaaactgcataatacagtatagtgagttgaatcgaccaaaaaaaaagcttaccgaatgcagtacgctgtgacagcactgcagagcatgaagagcttcgtgcctcacttgtgaggcttatccttcatgtagacacgcatcttgttgaaacttgagcgacttggtagcacagcctcatcaaaggcaaggtgggaaggcgcaatatacccacgcgcaaaggtcctttgaagcacttcaaccactttgcggatcttccaagcgcgatccgtgtgagcgcgtggatctttgttataattgaagtggaggtttcgagagatctccatgaagcggtcgcgagagagcacagagccaaagcacccgcgcgaaatggcaccttcgtcagcggttttccagtggttggaaagcttttcgcgattgggcgcaatcgtcctcgccaccagcaagcctatgaactggcacaactcgtgaggaaaataggcttcattccttccaaatcgtgctgaatgtcgcgtcgtgtcttcttcagtaggtctgaattgaggcgctgcttccgtcggtaccgccgatacgtttcgtcgatgcgctgtggaagcatctcccgatgatactcgttggagcaagcagcaatgtgctgccacagcaccactggcaggaaatagaagaatagcgccacgggggagtcacctcgccgaagcgcatccgctgttggccccgagtagcctcggcggaaagctgggtagctagacgcgttgtcgatgggctcgtagggagccatcaagtgctcgtggatgtcgggctcgacgacgtcttcccaacctgtggcagtcatgttgcgcaggacagcgttctccaggtttccggcgagaacctcgtcttcgcctccaaatgactcgaggaagttttcagcgaaaagcacctctgcagccacctcctatcaggatcgtcgtgaacatcttcaggtgcgcactgctccgcatcgtcgtccgagccgtactcaccagtctccacgtcatctctctcagcctcatccccggattccatggctccgaatgatgcaccgtcagctgcatccacggtgttcaagttgtcgtcaatgttgtcggccagcaactcgtcgcccggtgtgctttcgtgagtgactgcaccatctacagtgaataacacagcatgttagtattcagcaatacagtcaggatagtatgcagaatacgatacaccatagcatgcagtataaaatgttgcataatattccgtttaaaatgcagcatatcagtcagcataaggtgcaacataccgtcactcgagtcgtttgaggaatccacggcttcttgtgcactcgcagcactcgagattgggtcatcatcacttgatccaccttggtcgacatgcggtgaggtcgcgatcaatactcgcgaaggtcgacggttgccacgacttggcgtcgacggtgtcgatggtgactccagcgaccgtcggaccgagcggcttgcctgctgctttccgtggccgcgagatacaggagcgggatacatctccttgctggagctgggcggtggaggaggtaccggacgcgaagttgacgctggaggcgtctccacatcagcgctgggacgacgagcaggtagcggacttggtgtaggctgtggcattaagctcgaagaggccagtgagccagtagcagctcggactcgcgcttgttcccgcactcgggcttctgcagcttcgatttcagcgccgtaggtttctctgacatcttgagcagcagcttccaactgggcgtcgccaggagcaagttgcgtcgacggcaaggaggcagacgtcgcggcggggacacgcgcacgactccgaagaactagaagtaaagcagcaaatttgtgtcagttctgtataaatacaaaccattcaatataaacccaccgttcgcataatactccagcactccctcctcgcccatgaagtagtcgacgcccgacgccccgcttgtactgccgccgggtctgatgtagaagtagcgatcgtccagtcttcgtcgtggcggcgccttccgcgtccagccttgagctttgagctctcgccagacggacctgaacgatagatcacgcgctgtgacctcgcagtcgcgcaggatctttcctgtaatgggcctactttgactctctactttagcttacacgtgtgcgcgtgtatgtgaggaagcgtagcttagtttacattagagttaattatactcgggcctccgagtatagattaatcaaaataaacgatccaaataatgtttttgggttaaaatgagaactgctatttttgttttatgtttttgacttcctctaaatgtaatattctaagataggaatctgccaacggctggtttgcagcacccggtttggaggggttaacccgtccgcctcgacctggtgaccgaaaaaaaaacatgtagagatataggaacctagcggcaccaagactaattatttacaactttaacaaacagcacacaagtttgaattgacgcgtcgtttccagtgacaatgttggtaactctgtctggtggcgcagaaagcaggaggtggtgccatagaggctttgatctgtggtgctgcaccatcaaagttcgaacatcgtcgtggatgaaatatttcggttcgctcccaaatcctctcatgcaatcgggagagcccgctcatgcagccatccgcgccgaaatgcttcccgacagaaccgatgggcttagcttctgcgacgaaatcggctcatcaggagcctcaggtcctcgagctttacctaaaaaggttaagtcgcgaatatatgaaaccattggcgggaacccgggttcccgcaaatgataccgaccaaatcgcgaattatttacttaattttcggccaccatattggtaccgttggggcaagttaaaccatcaaactcaatgaaagagctcccactaatctgtcaccggtactgagtagacctgaataacgtaccttaccatgtcaaagtccaccttacgtgagcaggaggttagcaatgtggctggaaagccctctaccgctgtaccaggcaagagtctggattttcatgagagacacaggacgggagcaaagacgaattcaccttccgtttctctaccgagcttaagctacgttcaacgtaggtcatagaacaacactccaatacatttgatcatacatgggtaccggtagttttggggaaaccggggtcccgatgggtacccgggttcccgccaattgtttcatatgctcatcagtgtaaactgtatgcatttgacacgaatttcgaatgcttctcaagattttttttaagacaaacacgaatttcatttggcactaactgcagtctttactcaaaacttcctaccgtgaatctgtcgacgttcccgccggtgtgctcatatttcccgcaataaccaacgttgcggagactctgcccgacagtgaatggggagacggacagagtacaattatcaatccttgaacgaacgcttggttgaacagtatcggatttgacttgttccggctcacttggtccctcaaatcgtgtgctcaccgtgtcgcacccgctcgtcgtcgctgctttcgtcgcccgaatcatacatgtccgacacctcggacacctccgactcgaacgagaacttggggtactggcccttctcggccagcatctcggtgttgcgcgcttcgacatcgtgcattgtgatggggtccacaatgtcgtagtcgctccgcatgctgctagtgaccgacacgccggagtcggcgtagatctgcggggttctggtgctagggggcactgcggcctgcacgttgtacgccctcggagcaggtcttcgattcgcgtaggcctcctcttcgtcttctccgatggacgtgggcatgagctggctcacggtcagagggtgctgtcctgagcggaccgagtccagctctgagcccctcatggatgttccagcagtgcctgtcacgttgacgaagttgctggtgccccgtgcggacggaggcacgttgttgtcgccgtagtgtccagcaaccgcggccgctggcaagagctcggggcccgtgctggccccataatactgcgacgccgcctccgagtactgcgattcactgtagttggactcgctgtagttcgactcgccgccgtacgtgaagtcggccgtatttctgggcgatgaaccgctgtggtgcattgccccggggtacgcagggccgtacgtgctgctggcctgcgagtcggacatcatcgagatgccgttgcccttgccgccttcgtccttgtagctgtacgtcgagtagaggttgccgcccgaagtggccgtgcccagcgttctgtcggaccacgtgctgttctgcgacgagaccgtgcgctcctgcgtgtgggccatcttcttcttccgcaccactcgacgagcaacgaaagcgatgacgatcaccactagcaccacggctcctccgatgagtgccaagttgacaaccgccggcgaaccggttgtggtcgaggtgctgctggtcaacgccttctccgcgccggtgtcggaattgtcgttagccgtcgccttggacgcctgcgtcacgtccgagtcggtagaactcgttggagtggaaggggtcgtattggcaccctgcgtcgtgtcgtccgcgttggtctggctgctagtcgtcgccgtgccagaggtgtcggacgtcgacgtgcccgaagtgcccgtaccggtagacggagtctcgggggccgaagtttccggagcgtcagtctcaggcgccggggtgtcaatctcggcggttgatgtcgacggggtggccgtcgtcttcgccggcgtcttagtagtaggcgtcggcgtcgtatcgctgctgctgctgtccttgctggaagtcgacgtcgacttcttcgtggacgaagaggacgaggacttatcgcactccgcgtaggttcccgagaacgggcagtctccagacgtatcacggctgtagcaagagtagtcgccgcccgttagcgcgtacacgcacggcggacacgtttccgacgagaggctgcactcggtcgatccctcggacagacacgtcgtcacgtccgagcaggtcgccatcgccttgagagacctgcggcgaatcattcgatccgggtcgggtgctgaacctgtatttgaacgcttaattcgtcgtcggacctgtgtgtatgcgaacagcaaatggatgtccgcagttcgctagtagcggacgccagccgagccacgtgctgccgtgtcgtattcaagtgttgaatgaactcaacctcaacgagcgcaacgcttgagtctcgagtgagcgagggaacggaaatgaaggctcgaaaccaagtgcccgctcgattcgaccgatctcgccgatagagacctgggttccatgcagtcgtctttacgcgccggacggtcttgcagagcgctttatcctgcgattagccgcgcggtttgtgcaacttgccccggtctctggagacgaggataaaagcgagatcgggcccacgataggctcagctcgcgctgctaaatttttctggctggcgcgggcttttcctcggtgtcgcgtgttacttccgcgttgcaacagagaccataatccgcgtgggggcaacaacagcgtttgtatcgatccgttcgtgcagcaaaggcagaaaaagctcgaggccgttcctgaaggttggctgggcactgaaaaacatccgctcggtcgtcaaaggagacacgctcgtggtgagtgtgtcccgcagcgtggaattgtcgctggccttggcatatcgatgcggctctgtgggcgtttattaagtttgtcctgtattcctcacttgcggtttttgtcttcattgcacaaggtgtaaccttagggacggtcgcaaacttcgagtcgttgacgtccaggtcgcaggcttcccagcttcaccgccagcagcgtcagcgtcgggctcctagcacaagtattgaccaaactgagccacactctccaaacaaaagcagctaaaaccacgatacaattgctttgtacctggaatgtggacgccatgaagcccgggatcgggaacgtcgtcaagctgccacaagcaagcaataaacacaaatgagcgttggtaaacgtcggtgttttcaggccagcatacggagcatttgagcggagcacgagtcaagccgagcagatgcaaattcttatactcactaggtagatatctacctttccttcgttgttctctatcgacatgcagcctcgagcgtttagatgactacgaatacaggtacactgcgcgcgctacgctggatcgatgctaccggcaacgcgcacttttgcacattatatcgcccacgtcatgccctgagcttgcaggataaagatgtagactggaggtgaagctagctctgtaggtagctacagcaggaacatgcctctcctccagaatcccacccaatttagttgtcgaacccaggatttcggacgacctgctcgctcactctacgccctgggcgacgtcgtggggctggccacagtcgccgccgcgattgcttccacgtccagcacattggtttgattgtcgtcagccttgttgacattttcggtggcgacgtacgacgacgctgcactgcttctgtcgctggggcgcgggctgtccgccgactcggcggccgagagctgcatgaggttctggagctggtccaagttctcctgctgcagcttctcgcagcgcatggccgtctccgtcaacagcacgatgatgtcactgtgcatctcctcctgctctcggcaccacacctccacatcctccgacagcgtcgacgtggacgactgcaccgccccggcgctgctagacctggtgagttggctgacgccgatgtccccaaactcgtgctggcccataatctcgtgcacaacgtcgctgctctcgtcctcgtccactctcccgttggagttggaattcgagtatctgtccccgccgaccgagtgtctgtccgccgccatcgtgttcttcttggacctccgtgagaagaagctgctggatctggagcctcccgtgctgttgctgaagctgccgggtggtgacgacgcgcctcggggcgacgtctgcacgttggcgttggtgcggaagccgagcgagatggggcgcctcgtggtcttgagcttgtccacgatctcgcggaacttgagcgtgtccacgcgctcgtcgttgatgctcacgagctggtcgccgagtctgcagttgctgatgcccgtggtgacgccgtccgcgtgctgcagcacggcgatctgcgcgcccaccttgttgtccttccttgagaagttgcgcagcgagatgccgcactcgccgctgacccacatgaccgtgtagttgtccggcccgacgcggcccatgggcgccgagtacgtgtatgtggggcggtgctgcgcgcggcgctgaacctgtcggtactgctgctgctgctgctgccgccgcatcatcatggagctctggcgactctgcagcgtgttggagtagtgcgtgtcgtccagcgccgcgtccagcgccgacaggtcctcgagcgtcatctggctcgcgcgcgggtccagctgcgcgttggcgaagggcgtgaagatgctgccgcgcatgccgttctggctgccgtccagcggcgcgccggcgccgggcgcgtgcgtgtgcgtgtgcgtggcgcgcgcgcctgaggcgggttcgagtccgtcggccgcgttcagcagcagcgcgtcgtagagcttggacttgcgctccatctcctcgcgcagcgccttgagctggctgacgagcgccggcaggttgcgcgcgagctccatggccgcggagccgtcgtcctgcggggcgctgctgctctccataacctgcagccaacacgtactacgaggaggaaggttgggcagtgagagggattgaggacggttgcgttttagagcacaaaccgtctttttatccacattacatatgatagccagtcacactgctaaataacggtggaagggcggagctatactgaaatcaagtgaacggcggttgaagcaccttgctaatttgctgtcattaagcgtaattcgtagtccccccttcaagtgctggatccgcagctgccgagggcattgccagtgccgccttggaccgagcgtcgcagagcccccgcgagctttggacacggccgccttcgctagatattgacagccaagcggtgactggcaccgactgcaaagcgcaagatccgatctatcactagaggtgaggcttcacggtaagctgattgtcatcccaggtcttcgaagactttggagtcttatcctgctgcacgctgaatattgttgttgggggcagaggcttagacacactgcaggatgaccattaacgcatttaagaccgcttgttccccctcctgctactgcgtcgcggcggcgatgagctaatgcagtgagttgactcaacggggtcggtcgagctgtgctgccgcttcgcgcgtcgcgagcagcgcaatcgcgcacagtcgacggtgatatgtgcggtcgacgaagcatgcgccatgggcacactggtggggtgtacgcaattcggcaactacccgtactggactcagcgtcgtgggcttgtcataacgttcgaaccatgaatctgccgaggtgcggtcggctcagttcgcgtagtgacagcaccagccaactattcgtgcgaggtggtcggcgccattttcgcaccactacggtagttttgtgcagcatcccgcaggtacggttgcgcattctccgggaatgccacggtgaaatggtcgacgaaaagtgacgctgagctataatagctggcggagctatatgtgtgcgttaacacatcagctcatgggagcccaaacagtatcgcatacataatgcatctgaacgtcactctgtaaggtagggtagcagtcagcgtaacgctgaaggttgacagcgtctaaagtcggtggagcacgttccaggtgctcgcacgactccgtgcacagtatcgagtgcaactcgtcgtggaaaccacaacagattcaattgctactcgcaacccggtgagcacccattgacagcatcgcacgaaaactatcggaaactgtacagcgtaggtaatacttcagaagagggtttgtcctcggtgtccacaacgcggagctcgagatgtttggaggcagtgctaatatttgcatggcctacaggaatggaagcctggaactttggatactaaacaagagctttgttagcttgtaatagatcgctgcaagcatcggcgctgctgggcacaggtgcagtgtcgatttttgcgagggcgtttcgccaagaacgtcctgatttttaaaagagcatggcttcatagcaccatgccaatttttcctgtccacagtacatgtaacgccgctggctggacaaacctagacgaggacacactcgacagcagccatcggccatgcgttgcagcatcgcttacagtacaatactttgcgaaaggaagggaagctgctgtcggttcctgtagacgaaggtgtccatcagtctgcctacggtacgcacggttggaggccttgagctccgcttgctgttgcgcgccgcgcccggccttagcgaaccgctgtgtccgcggtggatccgcctcggcttcaaagcggatagcgcagctgaacgcactccaacacgcagggatttgttgcctgcacgagtttgaagttgccgcgcatttaactgctgtacttgtagttgcagttgggggatctgctgctgacgacccgccgcctcgactcaacacggcgattccggtccttcagccagatcgagccggcgagccaatgcaccagaacgctacggtaaagctgcgccagaacgcgcttgccgctcgctccaacgctgaacactgagctcgctgtcacacctgcacgcactcactgcttgcttgctcgctccattcggctccaggcggctagcgcaatgacttgcggcgattccgcagcacaattggctacagattgtgtcaaaaacaatgcagcggttgaacttggtgcatacagagccccagcgtgcgtctccaggccacgaaaaacaaccttcaagtttgctaaacagtcgcactgccatgaaaaaaatattccgtccaaatatccgtgccaagtcaaatgtttagcgttaaaaatgctggagttcgccgcatcggtagaccgacgccaccgttctcagcgttatccaacaaagcgcagaccctggaccacccagatcactggtcgcgcagcgtgcatgctcatgaccaagctgcgcgcgcaaccaggacagtgaccgcgttgcagccagtgcaaaaagtcggtgctccctccgcctctatacaaatttaatattacaggtctctcaacccccaactctatcggccttggaaaccgtaccgtaacttcaaataaaatatgaaggctgtatgaaaatctcgatttcgcaccggaaccaccacgtagagccgcgcacggctatgcgcttcgcccttatgcatcgtagacgcgccatctccgttgccatttcccgaattgctcgctggaccgcaagccacgcccccagacccaagactcccagacccacttgaatgtgcgacgtgctacagcagctccagcccgccggtgccttcctccgccaggcccagaacctccagcccgcgggcgccttcctgaaccccatcgcgctcgtgggcagctgcaccgacatcgatgaagcgctgcgcttctgcgacgaggaggccgccgaccagatggagcgcgggcgccagcaggagaacgccactgcaaatgacgctgagcccgtggacttcctcgcgtccatccgccgcggactcaacgagctcgtggcggccaacgaggccgacgacgaagacgacgacagtgacgacgacgaagacgacgagagcgacgacgaaggctgctactaccagcccaaggagaacacgtactacagccccggccagaagctctcgggcggcttcccgctggacgacgcggggctcgacttgtcggacacgtccaccgcctcgtcctcgctcttcacggcgtgggcccagccagagtccgacgaggagggcgacgacgaggccctgactcaggacctgaaccaggacgacgacctcatcttccagctcgagatgtagtgtagataccaccagaacactatttatttacctaagacaaagtatggcggcggtgtacagcgtcaaaaatgatcggaatgcagctcccccctccatgtcgacccgtcgcgtgtcgtgagttatccataaggctacagtaggggagggaaatcgaagcgtcatgtcaataagcacacggtcgttgcagtatttctctttaggttgtaattctacacggctactgtatcctgcctgcctgcctgcctgccgctctacatgcggacgtgcgtgctcgagaggtcgagctgcgcgtcctcgatgcccgagatggactcaaagttgcgcgtgactgtgctcgggtccggctccaggctgtcggagctctctcgcagcacggccccctcctggatcatgggctggtctccgatggcttcgtcgactgcgttctcattctcgaacgtgaagctcacgaacgacgtgttggcgctggcgatgcgcgtgccgttgtccagcacgctgctgctgttctcggtgtagtggcgacgcagcccctggatgagtcggtcggcgctgggcttgaagctcatgccgttgcccatgaagtggaacagctcatggcgcgcgagcgagtagcgcttgtccaggcccgggtccaggtcgttgagcgcgatagggaaaatggggcggcccttgtcctctgcgaacgccagttggtcgcgcaccagctcgttgttcattgtctgcttggagaggatcacgaggaagcatgtgcactggaggatggcctcttgggccgcgtggatgcgctcgtcgaagtcctgcccctcgacgttgcggtcgccgtagcacatgatgccacagtccgtcagctcgcggtacagctgctgcacgaagcctgcgtgcttgtctccgtgcgagaggaagacaaactgcttctgcacgctgctggcgttcgcgtcccattgctggaagagccgcgagaagccgccgccgccgctcgctaatatcgttccggtcgcagtctgcttgaggccagcggcattgcgacgactgctagcgatgttcttctgctggacggcatcgcggttcttctcgatctcatcacgcacaccgtcgagtagcaggcggaactgcgacttgaacttggcctcgtcgtagtcgtactcgatctgccggacgttcgtactgttgcgccgagtttgagtgatggcgggctcgaacgggataatctgacgggtgtacaagtacacttgcaggtcttcaccgatgctaacgctctcagacgacacggccaagatgggcgtaccgacctgcttggccaatgccaactccttcaggcaccactccgatgccgcgtagtcttcggtgagaagacacagcacaacggcagcattcgtgatcccccttgcgatctcctcacgccaaacggagccaccaccgatgccactcgggtccatcaaatccagccacgtcgtcacgttcgcgtcttccagcgccttgcgaatcttcttggcgaactcggcatgcgagtgcgtgtagctgatcatcacgtcgcgctggccggcagcacgcttaatctcgaagagcagtcgagttgaagtggtacagtccagcggacgcaatccttcaatgttcatcttcatgaggttgccaccgttggccagaatggccaatgcggactgctcgttctcctcgcgcaccgcaatgtgcagcgcggtgtctcctgttgtggggagttgataattgatatctgcaccagcagaagtcaggacgccgaacaattcgcgagacgcatccagtccacttgcagcgcacatgagcggagtcatgtagttcaagtccaccagtctcggatccgcgccggcctgaatcagcgagcgtgccacgtcggacttgttcagtcgagccgcccagtgcagcggtgagcgtccttgagcatcctggaagttgggatccgccccagcttccagaagtaaatcaacgacctccagtgctccactgatggcggcccagtgcagtggagtccgtcggttgagacccacatagcccaactcgcccaggcaatccacatcggtcttcttccgcaggaatttgcgcacagctaacacatcattccgaccggcagcggagtggaaaggtgttagcgccacatcgccgccccaatcttcaagttcctgtgccacggcgtagtttccgcgcaaatacgcgagctgcaacgcggtcagcgtgttcataaagcctggatccgggactgccaatggatcggcgccattcaccagcaattcacggacaacatccgggtgttcggccaggaaaagtggcggtacacgatccgagcgatacgacgacaatgccagagttcgagctgaggctccacgtgctaatagccaccggacagcttccaactgaccagtagacaccgcacaatgcagtggagtcaccaaagttgtacggaaaattgaagcggccgattcttcatcagcgccgcctccgtcaactccaggtcgtgcaacgaagaagcgagcaaagtaccaaaagagatcgccggtggagaaccgcacccgagtaaacttgtccatggcagtcacatcgaaaccacgagactcgagcagctccaacgcgcgaatgttgccgtggtaagccgccacgtgcaccgggttcttgcgagacagcgcgaaaaagcccaacagtagtgacgccggagcataacacttgcgaggaaacccctgctcttcgcttgtcaaacctgcagcttcggcgtagtccaagatgtcgcgcatttcacggagatcgccctggcgcgtggccttatagagacgcttgcgcaccactgcgagcgccttgtcggactggttcataagttgatcaacacccggatccatgacgtggttgcggacgtcaccagtctggtcgctctcttggaaggcccccaacaacatcttaacgtgttcacggaagcgcgcgaagtactggagctccgtgaagatccacacgaaacaaaccacactaacgatcgcaaagagctgcaccgcgtggatatcacacgtgaagacgccccccttgaagaacatgtagaggaagaacatgaccacgaccgcctggaacagcagcagcagcacggccaccaactcgcagaactggaacactagtcgccgcttgatcttggtgagatttccgttgtcctgctcgtcgtcgtccagatccatccctccattgccagtctctacgtccgtcttgtccaactgcgcaccaggagcgccaatccctggcgtggattcctcctcccgcttgaacggctcaaacagccgccaccccgaccccggcaagcacagcaagatcaccgccggaagtgtgtggtagatcagagccgaaaaccccacgacgttctcgcagctcgacgcctggaacgtgtacaccagtcttggcgagtgcagcatgaagccgtactcctccggtgccagctcctcgttcagcaccaggctgtggggcttgtagaaatagtagaagcccagtcccgcggccagcacgaccgccaacggcatccccgtgtgcagcagccgccgagcgaagaaggtgttgtggcggaagcgcgcgttgagccagtggcgaggcacgtgcggcatcttgccgcgcagcttgacgctgccgttggctccgtggtagaaggaccttttcttgctggacatggacgcttgaggacgtcggcgcagttgaccggcgtgggacgtcgccaattggttgagcgacaggtgcgaccccacgctgagccgcgagaccacgctggacgcgacggacttggccgcgccttggcccatgagcgggatcatggggatgcgctgagggtcctcctggtcatcatctcgtggcgcgccgtggccgaccgactgtcggctctcgttggacagtgtcttggcctctgagtcggacatgcgaggacgctgcgacgtcatcttgtcgcccagtggggtggacattccttcgtacatgtgcccctgtcgctttagatcgaaaagttcgtcttcggagcacgagctcggtcgggttagatgaaaacttgttgctgttgcctttttaggtaagaaacaattgagacggttaaggtgttgaagtttccggccgtcgaagtcgaaggtcgccaatgagctgagctgagctaggccgccgccgctgctgcgttgctgccttcgcgggggaggtgcacagcgggccagcctcgcctcagcactgcgatgaatatagaggagtgcgcgcactctcgcccgccaaagtggagtttcggcaccatcaggaaggcgtgcccccacccctcgctgacgtctgcgacggttccgagtctgaattttacgccattcagagactttcctttgcccctcgataaagtccgcacaaacaacgtgaatattgagatagggccgcaccaacgagggacaacggtgctatgtgtgggaccacgacgctacgttggcgatagatcaggtttcatactgaaaccaaatgagtttcagacgggcagcatgacccgttcagtatctacgctttggagaccaagacgtcattttgccgccggtgatgcggcaacggcgcttcaatagccatataatatccggagggtccgccaaccacaagctttgcttgtcagcgctagccagcattgctagcacgctggcgtgctttgtccccggcacgtcaagccgcatggaaggacagcagccaatcagcacggcgaaatgtatcaaaagtagtttacagcgaggcaagctggcagcagtagggctgtgggtcttgactacccgaggcttgtcttcgtccctgtagaatctgctgccgctcagcggatggctcggcagatacatgtacactcgcagcccgcgacaaggatccaatttatggaggccacccccttctggaactggcaaagttgacaggattcgcgtggtggggtaattcccaaaatacggagtgctggggaaacttttgacattttcaaccttttgcgaccaaacacggagttgtgggaaaacttattcccaagaccagcctatagaatcgtagaggtagccttcactgcagaaaacaccagagactcaagagcccacgtgctggtgcacgccgctccggacgcgccgctggagaagacgctggcagtcgccgccatcatggacggcacaccctccggtgccttgctgtccacaaccgtgctgctgcagtaggagagcgtggtgcgctcgaacctcggccctgacactgacaccagggactcgctggactcgccaaccgtggcctccctgagcgagctactggccaccaagacgctggtggctgcaggagacaaatggcgtggtgaagtccatgatggtggcgactgccagcgtcttctccagcggcgcgtccggagcggcgtgcgccagcacgtgggctcttgagtctctggtgttttctgcagtgaaggctacctctacgattctataggctggtcttgggaataagttttcccacaactccgtgtttggtcgcaaaaggttgaaaatgtcaaaagtttccccagcactccgtattttgggaattaccctcgcgtggtgacacagatccctacgtggcttgacgcacaagatatccgagatgcgatgagttgggggcgtctatggtgatgctacacgtaccagcagcgttaaatgttaatgcatgcccggtgctcttgtcgttttatttatttatttatttttcactgtgaaacggtggaggttcacttcaatatgtacccgactattggtacaattgtgcgcacgaaacgacgcgactcgaaatagctacatgtagtgtagtgctgttgctgttcgtggctttggagcacttacggtgtcatgccaggcaaggacgcgcctccagctgagaacagcaacccgtcgatcccggcgtcaccggagcgggagcgggacaagtgggacatctctcgcatcagcaaacactgggcaatcgacccggagctgcggcggagtctcccggcgctcgctcgcgccaaacgatccgagaacgagtcagctagcaacaagttcctgcgtctgagcaagcttccactgcctgcgtcgcctcaatccgattctctattgctgaacttggcaactccaattcgcggtggccgcagcgtctcgcaacgggccgtcaccgtcaacgctgagaccaaggccaagtacttcggcaaagctgcgaagaccgactgctacgccattttccggcaactcgcaacgcagaaatacttctcggtcgagcctctgagcgagtttctggcggaacaggagataaataggcccctgcacggcgcgcgggacgaagacaacaatccggccgtgcccagtttgtccactgagggtatcaacaacggtgatagctcccacaggcagcatataggcagctcgctgtcgcattcgagtcaacgaaatggagtcggcagtgtgttgagcggcgatccgttcactgcgcggcacaaattttcctcgttgtgtctcgagcgcgacctgccaccgtgcatccgactcgtcatacgccagtacttctctccagaaatcaacgtctcgcacatggccataggcgacgatctcgcgtgcgtattcgctgcctgtttgttggatttgcccatggttacaggcctaaacgcgcgcaacaatcgcctccgggaccgaggactgcaagctctcgtggatgtggtcgtgaccaagtcggatctgtatcatctcgatctatcggaaaacaaagtggacagccatgctgcccacgcacttgcatcgtatttggggtcgtcgtcctgtagactacagacccttcgccttgccagcgctgatgtagatgacgacgagcttgtccccttcgcgcgagcgctacactccaacaaatctcttcaaacgctggacgtgtcacgaaactctgtgggtagcagcgagcatttgaacgttgttcgaccctcagtcaccacgggcggcgaggctctagccacaatgctcagcatcaacagtacgctcacgtctctcgatctgtcgtggaattacctgcgacttgcaggtgctgtggatatcgggaaggcgctggcctacaactcggggctacgcgagttgaacctggcgtataacgcattcggcaacgcaggagcgcaggctgtaggcgacgcgcttctatcaaacaccacgttacagcgcctgaacatgagtcacaacaatatcccggctcaaggagcgcttgcgatcgcgagcgcgctcaagatcaatatcgctctaccgctcacagaactgatgttcggtggtaacccgctcggtagtatgggcggccgagcgttaatacacgctgctgccgcgtgtgcagacaagaagaagctgtcggtgtccctcgaagggtgtaactttgacgcgtccggagacggtgacgggtccttcgacccagcagatcccaccggaagctacgacctgaacatggagattccgtacgagcgcgctgttgcgctggagctgctacgcgttgcgaatacgaagcagggctgcaagttcctgtctatcgtccacacttcatcgatcaacaagcagcgccgcaacatccgcgttgagctgcgagagactcaagagggtctcgaagcgagacgaaagttgcttaaaaccgctggcattttgaccgatgtgcaagcccccagtgctcgtgaattgatatcacggcgactggaccgagcgtcacttaaagagctcttccatgagctagacaaggacaactcggggtttatcgatgagagggaacttcgcgttggcatgcgaaagctggggctgcagttccgcgacgacgatgtaccgcgctatgttgcgctgtacgatttggatggtactggtacgattgagatcgacgagtttgtggagctaatggagagcttcaacctggacgaaattgacggtggcttctcgcgcgagtgcgtagatgtggagactaatctaccattcgagattcctgctgagggtcgattgcagctcgatttcgtagatctgcacgtgtcgttgggtaacgatagcgctcagtcagacgcaagtgtggagcgcctcattgagaacatatcgtcgagtaagaacaagacccaaatgttgtttatggccaagactggtctcgtgttcaaagcccacgaggctcagctgctcctcgaagcagtacgcgacgtgtgcgatccctcccaggccgttatggcgctactacctcatatggtggaccctcgcaatgcgtacactctgatggagcacaacctcagctcctctgatcgactgcgcgtacagcatcttatgggtcaggcgcttcagcccatgctcggtctggcttcgggacactatcgtattgatctgagcaacgatatggaccggataacactacgcaagctcgtggagaacagtaatcggactgcgttcctacgcaagaaaggaggcatgaaggacacgagccagcacatcaactaccacggcttccgaaacgaagtgcttcatggtaaatccttcgttctggagcccaaattcctggataccgcgccaaaattcggctacttggagctcgactacgttcagatcggacgcgcgccaggccacccactctcgaccaagcgcttcgagcaaatgcttcagctgtgtcagctcgatcgcatgggcccaggaatgggggtagccacacaaccagctccttcggcttcaaaagtggcaaagaatacacgaggggaaaggaactcggtgtctactccggcacaagtgtctatccctgcagaatctgtattcccccctcaacgtccatttacgcagaaaacattcgacgagtacgaaaagatgcacacactgaggaactacattgagtacggagccggcttaactcggtccattgaactaacgcctctacctggcgaggatgccactcccgtgaagatcgacagcgaggatgaagctcacggtgacgttacctctcggccggcgagttcttctcctagtactgaagagaaaccacaatcgcagcccagcagcgagagcccaatggatggagaaagcggttttgagcgcgtggctacacctgcaatccctgtagctccgaacgtctgcactgcgcgtcgactattattcaacattcagtggtgcttatccacgcgttggatcacagtacagcagggtatcaggctgctgagtgtgtggcctgcagctttttcgacctcccgctgcgacttggtctgcaccatcttcgatcgagtcacggatctacacaacttcagtggcgtcttgtccgccctcactgatgaagaagctgctcaggcgctgtatcgtttggggatgctgaatgtgttgaccccactatggcccgataattactacgagcttgctctcgcgcgctacgaggagcgggaggtggccaaggcgctagtgcgactcgccatcgatgaaccgggtgagaactggcagagggaaactttcggctggagtcgagacgagaaaatcccaggctgggagctcaactactcgtggctcaaggacggcgggttccctgagaagggctacctcagtcttgagtactattcgggcgccgacaaaggctgtggcccggtgtggccaacgcgccgcgagctggcagcttataccctatgcggattgccagataatatcgacgcgttcgagatgcagatcgactcgctcagtatgcggaacttggtgcaacgacaacagtagtgcagtgcagttacactaatgaaaaggctataacctgcaataatgcagcgttggaaactgtacacgtctttccacttcaacgtgacttgtgacgagtcttttgcaggcggtgggagggactttgggtgacggacatgctggcaatgatggcccgcaccccgaagaggccgcgcgcgacggccacctaccttaccttgcaggctggcgagccgacgcgaaccgtacacgggtcttatgcactctgcgacttttacatgctttgggtcacgctcgtgatgcatgggtgcccgacggcaagagcaagaacaacgctcgccgagtcgcgacgctacgtgctgtcaacagcggtcagaagcgttgtccgcgagcgagacagaggcaggcggggaggaccacgagagagcgagtcaccgctgcgcgcgtcgtgttgaaggcaatttttgaggcgttggccacgactgaccgacggcacgatcgccgaaaggagctgtcggctacgctggatattccggtagcggcccggccccagcggtggcggtcctagcaggacggcaacctctttcgagtctcggagctcggaggccttcgctgcatcctcctcaggccctgaggctcagggtggcagccagacattgaagccaaagctgcaccgctcggtcggtcgctctgacctcgcggtggtcttcggccgattgaagcagccgatgaagactcacgatagacgcccgccttctcttctggagcagccacgaccaactggcgattaccatgccccccgccgcgatcaatcaagcgtcgattcaacgcatggccagcgtgtgctagtggcgacttgcgtggccggccaagcggagcggcgtgcctctcggagcgctgccaccaggtagccatctggccagtcaacggacactggctccaccggggggaccaggcgtccgccgccgctcgacgactgccgcgattgaagcgggggagtcatcgagatggtgagctctgcctgctggacgagggcttgcgggcaagctggcgtcttatgcggcgccaatggagatcttgtctcgccattccattccgactatgctgacacgcttggtgcaagtgtgtgtacattatagccccgacctgtccggcttggatgctgctcgaggtcctcgagtcgaggatacactgatctgggcagcccagaccggtgaaactttgaaactttcgcggagactttgccccaccatgtatccgttcctgagctcggcgtccgtataaccagctggatgttcagaaggatgaaggttgaagcacgcgtcaagtctagcgctgcgttctgcatcgtgcgttgtggcgggcctcttcgtcttggcgtagagatactattgagcccgaagctttacgatagcttgggggatgaaggtaggtaggtatcttcttttgggtctgcaaaagcgctcgtcttatccagggctatccaaatgcctgttgtcggcggaagaccacctcctaaaaattgtccctcgacatcggcttctacgcgtgagcacgcacgacgtccgggtggttgcacccgctgcggacgcggctccgtatttcgtagaatgcgggcacctgctgcgacttgttcatgtaggcatctttgtctagaaggttgggggtggttgagtatctgcccctctttgtgttcctttcgcgagaaaaaggctgaccacaaacattgattcaacttcaatttatcctatacaattttgaagtataattgattgataaatcatgataagttgaagttgcatcaacattatgctcagtgagactcaaaagtgaagattgactcgatagagagaatataattgattaacaggatatagtcttgtcgtagagctggctgctgagggatccatacaggcgtagctacagggagatcatcggcgtcgatgccttcggggaaacccagacggcgcaaaactgtctttatatcgtcgctgacgaaatgaaactcgccgatcggtgatagaaatgctggtaatgttgccgaaatgagaagcccaagcgaggaatgttaggactgaccacagcgtctgccacagtatctggacgggctcacactcgaagaagcaatgagaggcggtttcgatagcgcggcaaccatcagaaaggaaccgcgcccccagcgttagatttccaaagtagagtctcacatcgttgggcgcctaccgcggactcgtatcctagagatctagcgatgtgaccaccgtaggcggagatgcagcagtgcgcgtctccgggagtaggtagccgactaaaccgcaacaaattcaaattcaaattcatggtgacatcgtgcacggtaagtagaacccgacgcatacacctccatgctttaatccaccgcgcgacctcaccctctgtacagcccaatgctgtcactgggtgaggtttcggtacgggaaggttgactcgatagaatcaagccatacctacctgctatcgacttcacgcgatacattgttgccaatactactcggactcgaaaatgtgtttgtctgggaaaatcagcccatcgtcggggtcggaaagtgcccagggacggtcccgtataatggagacaccagcgacctgctaccgtgagaccaagacaacttctctaggaccgatgaaaaccatgattcgctagggtgttatagtacgcaagaatcggtatttgatcagtaattacgtatcaatatgcttagagataagtcacaggagaaattcgtagctgcggtgatgtcactatgttcgcaatgacgagatcagccgacgcacctggatcgagcgcaccggcttaatactggatctctccttactttccgtcgatcagagcctcgtgaagcaatgaaaaggacaatcccaaacaatccgaaaatatttttaggccattttagctccccctcgcttggacgcgggagcaaagagctgctccaagcgcttgacatactcaacgaaagatacgaccaactagttacactttgtattgcgtgtgcgaaccatacccggcttcgggtcatgagtctcactcatatcgagtcgtacgcagcatttgcaatacatatattttgcgcagatggtttgctagtaagccaggtatatgtaatatccacattggtgttgccgctaactctttctcgttgaaagctctgcagtagcggcgctgtatctacagttatcctttcaggcatttaacgcgagactgcgctctggactccagagtctggagacccttcacatcttggtcagcgcgtgtagacgaatccgatttcgtggtttgcacatctgtcgacgatgcgatggaagtgtccacgcagacggctgttcgacatcactacattggtcgcgttgtcgcgctcggagtgcgcttcctgcagcgcttgcgccagcgctgcagacagcgagcaagcctcttgcttgtccgcttccgttctcctgagcaccagcgggtgggctcacctgggtggctatgcggtcgaggttacggtcactgtctgcgtcgctgtgcgcttgtagcattttgtgttgttttcatgaaatgcggatgtccctggcgtttgactgcacaggcacagtgccactcgaagtccgccgcgaacgaggagatgagtgcgaaaacaacgcggccaatttacgcgcgataacctgcaatatccatacagtacatgcatagtaacctaccatgaggcaatagctcgcccgtatctacaagacaaaggacatgtaaagcattcagctactacgaaatacggagccgcatccgcagcgggtgcaaccacccggacgtcgtgcgtgctcacgcgtagaagccgatgtcgagggacaatttttaggaggtggtcttccgccgacaacaggcatttggatagccctggataagacgagcgcttttgcagacccaaaagaagatacctacctaccttcatcccccaagctatcgtaaagcttcgggctcaatagtatctctacgccaagacgaagaggcccgccacaacgcacgatgcagaacgcagcgctagacttgacgcgtgcttcaaccttcatccttctgaacatccagctggttatacggacgccgagctcaggaacggatacatggtggggcaaagtctccgcgaaagtttcaaagtttcaccggtctgggctgcccagatcagtgtatcctcgactcgaggacctcgagcagcatccaagccggacaggtcggggctataatgtacacacacttgcaccaagcgtgtcagcatagtcggaatggaatggcgagacaagatctccattggcgccgcataagacgccagcttgcccgcaagccctcgtccagcaggcagagctcaccatctcgatgactcccccgcttcaatcgcggcagtcgtcgagcggcggcggacgcctggtccccccggtggagccagtgtccgttgactggccagatggctacctggtggcagcgctccgagaggcacgccgctccgcttggccggccacgcaagtcgccactagcacacgctggccatgcgttgaatcgacgcttgattgatcgcggcggggggcatggtaatcgccagttggtcgtggctgctccagaagagaaggcgggcgtctatcgtgagtcttcatcggctgcttcaatcggccgaagaccaccgcgaggtcagagcgaccgaccgagcggtgcagctttggcttcaatgtctggctgccaccctgagcctcagggcctgaggaggatgcagcgaaggcctccgagctccgagactcgaaagaggttgccgtcctgctaggaccgccaccgctggggccgggccgctaccggaatatccagcgtagccgacagctcctttcggcgatcgtgccgtcggtcagtcgtggccaacgcctcaaaaattgccttcaacacgacgcgcgcagcggtgactcgctctctcgtggtcctccccgcctgcctctgtctcgctcgcggacaacgcttctgaccgctgttgacagcacgtagcgtcgcgactcggcgagcgttgttcttgctcttgccgtcgggcacccatgcatcacgagcgtgacccaaagcatgtaaaagtcgcagagtgcataagacccgtgtacggttcgcgtcggctcgccagcctgcaaggtaaggtaggtggccgtcgcgcgcggcctcttcggggtgcgggccatcattgacagcatggtgccatcgtgtccgtctccgcgacggccggccgtatgtgccgccgcaacaaacggtcgaagagcgccatgggccatcacgaatgtggtaaggccgcgtctcggtagtgttgtcgagccgctggggctccactcgcgccgctgcagcctgcgcgaccagctggaagctgtcatccacccggaatcccagctgatccccaagtgacaagagcccggtttgtgcgcgctggttgcttgacggagcttgtggatcggattcgctgcccctgcctttcctgtctccgctgcctgctgtcggcgcctccgcgagagagagccactgccttctggtccgaccgctctcatggcgcggcttggctgcgggtctcccagagcagcctcattattcatttggtcgcctagcggacagacacacaggactccacctcctacagtatcatgtccacgttctcctcgatccgctcgttcccgatgcagccccagcagtatcagtgccaggggttcggcggcctgccgcacgcggccagctactcgagcccggccatcaacccggcccaggagcgcatggccctgccgcctctcagcgtgctgccgtcgcgcgcaacgttcggctactcgcccatgcacaacaagtccatgtcggtcatggtggcctcgccggccgcgtcgttctccatgcagccggcccagtcgccgtccaagaagcgcgtgcgcgcgctgcccaacgcctccaagtccatcacgctggacatgctgcggccgcacttcgagaagccgctggccgaggtggccaacatcttcggcatctgcatgacgctcatgaagaagatctgccgcaagaacggcgtgccgcgctggccgcaccgccagatccgcggcctgcgcaagagcatctggtccatcgagaaggcgctgcgctgctgcgagtccgaggcccagcgcctgtcgtacaacgaccacctccagaagcagcgatcgaagctgctcacgatcctcaagggccccgccagcccgagcagcaaggccgccttcgagctcgtgttgaccgagccgtgctcgcccatgggcgagatggccacccccaccgcggccgccgagaagaccacgagccccgccgtgcacttccagctgccgacgcccacggcgtacgcgcagtcgccgcgcaacgcgtacgcgagcatgagcccgcagccgcagatgggcaacgtgtcgcccaagctgccgtccattgcgtcgctgctcatgaagaacgaggagcagcagcgccccaacttcagctaccagttctaagtgcgtcgctctctggtcaagagtgaatgggtcagtgtccaagtttgtggtcaaggcgtggattaaatgtcgtgaaagtgttgtcaagtagcgtagtgttcgtagcgtagctttgtgttaggtggactgtaacaagcaatgaaagggtctatttatcccaagcactattagaacccatctttctcaagtcctaactgttggaagaaatgttgctggacgttcgactaccacgtaagtcgagaagaaaatcctctcgactgtatgcagttcacaatcgagtctttaggagtgccgccaagattacatgaatatgaagaggagggctaaggatagttgttgcctttacatgttggaatctattacacggtatcaacgaaaaacaccggcactgtttaccatactttggccgcatgggtattgcaaagcgtccacaaggtagagatcattgccaccgctatactggctgtatttgctacacaacttcgcgctaattcggctgaaaacgaggtgggtaaagatgtggtaagtacaacggctcgttgccgcattataattttgctaagttggcattacggtatctcttgcaacgaacattgagttatcgagttacttcaaaacatgatgaaccaaatgcagttgagctgcttggcgtcagctttgagcaagctattctgtggttcgagccctgatcacaacgtgataccggcaaacatatcgctgcacgaaaacatcatcccaatcgagggccgagattaaactgcttcttccacccttcatagtcgaactccacttcccctcgcagcattatgagggcgctatcgtccgggcgagtgagtgcaacaaagccattacgggcagtccaaatcgtaatggtgacgatacgactcagatagaacggtaccacacaaaatttggcctgtcgaccgagatatgtaaagtcaaagataactcgatcacgcagctccatatttccccaagtcaacgcatccagaagaatcacaacttgaatcgagacgtagctcacaattccattgataatgatccagtgcttgtagcgcagtcgatgcttcatgactggagttagcgcgtcgcaggccaatattgggaaacctattgggaaacctaagagcaaactcgaggccataccgcacgtaggtatccaactccacccgaacatatcggcgacacacaggcccgcagcaataatttgaagctcaaggaacaaaaagtggaaagacgcgaggacgcgcttgagtaattggcgttgagagcagcatgtgtgaactccacagtaaatggcactcgctatcagtccacctacggcactgaccggagcacctgtagcactcctcggtaaaaagatggagagtgcgccaaatacgcctccaattgtgccgcagacatgtacagcgatgagttgccaggctgaaaggggtgtaagcgctccaattcgaggccacacggtgtcgcgagggtcaacgcgaaaggattccgcagctagcaccatttgcaatagtggacgtttagtatatcggttcatctcctgaggcacaatgtgtctctcggtgaatgaccaatgatttcttgccgttcgcacttgatgcagcgaaatactgtcggaagttgaagggaattgggtccctacaacatttaacgcaattttgcatctgtaccccagagatttcaccgatactcgttgcttacttttctgctgcttgaggtgtcggtatcgacggtaaacattccgcagcgaaagcatcgtcatcgttacgagggagttaactaaaacgtcgttagtggaaagcgttctccctccagttgtgatcaattcgtagtgctggaccccatcgacaagctccagtgacagcaacaccgtaagcagcacgtaaaatgtccactgcatgaacgccacaccgacaatcatgcgcgagttgcgcaggtaggcttcttctaggagccaaaacgtaaagtctacccagcaaaacagcacgagaaccacccgagaatcattgagaacggcgcaaaatgtcgtagcccacaatgtgttggccgtctccaagaaccaaaagtcgaaggtacaaacgagaatcttcatgtaaccagtgcgcatgtgagatagtgccaataccaatccgagaatttgcaggaagacggatatcggggcaaggatacatccaactgagaccggggacgcgaaagtcgcgattcgagctgaaagaccaacaattcccagaattcccaggaacgggtttaggcgcgtagcgattcggttgaactgccttaaggcgcttgggctcaacaagactgtcttgaccatcggtagggggtcaaacgcgggaagagtcccgttccacgcaacaatccggtagcagccatcgtcggcattgaccacgcggcttgaatcaaagggaaggatcatgctcaaccagctcaaagtagttgctgtgcttgcttcattgagctatcgatgtatttctggcctggtggcccgagtgatctgtccaaaagtaggtgaacagcttataccaaaatcaacatttaccataagtcaaatatgacgtttgctattgcgccttgggtataacgtcatcctctacagaatcttgacagttgaggacttggcacgatagcttttgctctggaaacccatgggcagattgaagaaaggccgtaggcacgttaaaacctgcctgtatttggacacttcgaatatccacgccggtaaaggcaagcagagaccccagttcagaaggagttcgaagttataatatgtgtaaccttgaacagcaaatagtgcacatttcaagggaactttggtcgccaacgactatcagacggcaacggtcagatattcatcggacgaagtgggttgcggtgaacttcaagggagctgcggtggacgccaaggtgttaatgttgacagctaaggtcaatatttgctgggagcgatagtacacgcaacaagatggcacttgcacggttgccgacctgcgcttcgataaggttagtagtactggtatataccggacgggtacgtacacgtttttacgccaaccacccttgaactcggtaagctccttttccagtgcaatcgccttcccctttagcgcgaggatctcattcttggccgccagcagctcctgttggttttgctggttttgttggccttgttggttttgctggctctgttgggaaatcacgccgtcgctctccagaaacgctagtgccgtgtggaacacggcgtcatcgtcttccaagaagagcgcgtcgcagaacaaatcgtcgtggtcatatattgagctcttcctcttcttccacggagacgacgttgagcaatgcaacgttacaagtcggctcatgatcctcacgcccaatggaccagcaaaaatctatgtattgtgaacggtctgcagcgctaaggcttccgccgccttagttcaggatgaactggttcagcatcgccagcgcctcggcgggcttgtcctccgggaccatgtggcccgcgccccgcaccgtcacgaacttcatcgaaccaaagtcatcgacaaagcccgcgatctggtccgagtccgtcaaagtccacgccgtcttgttggccgcgcgcgtcagacccagcgactgaacggcccactggccgctgataaagtcgcacgacatgtccacgtcgccatggtagacgatgccttcaacaccgctctccaccagcgacgaccacaccggcgtcaccacttcgtcgatgtccatggtgtacaagagcgccttgttcgcgaggatcgtggctgccgcttcgtccgagatgccggcgacgagcgcgagaggaaatgtcgccgacgtgtactccactgcggcacgagcgggttcgcgtgcagcgcgtcgcgcacctcagcaatgttgaagtacgagttgggctcgtcgaacgagatgcacacggccagcgtcatgcggatcgggcggttcacttcctgcgccgcaccctgcagctcggcgagtatctctccgatggagccggacgactggccgctgacacagtcgctgtagatgtcgtagttgttgaggttgaggcccgagatggtgctgtcgaaagtcgacagcgcgtcgttgcacgaggccgtcaggttcgtcggcagtgcctcgccgggacggagctccaccgggcagacgttggcgacggcgaaatagtcctcaggcgagatcagaccatggtggtacgcaaaggccggcgcactgagcgtcgagaactcgttgacggcgttgccgaccgagaacttggtcaggttgatgatctcgctctcgtttctcgcggcgcggttgccctccacgatgcgctgcgccgccagcggcacgtacacgcccgcgtagctctcgcccatgatgatgaactcgttagcgcgcagccacgggaacttgccgaagaacacctgcagcatgctgtacagatctgcgcgtagtcgcccgaagagtagatgccactggcgttgtacgtgtagccgacgccaataggcgactcgatggcgaccaggttggcgttcaggttccacgcatagtcgttcgtgcgcagcgtcgtgccgtcgtcgttgatgagcagcgggccgagctccgtgaacaagcccaggagggagctggcgccgggaccgccgttgagccacaggatcaccgggtccgtctcggatgtgttgctctgcgactcggcaaaaaagtagaagccttcgccgccgttgtcgatgttgagcgcgccggagaagagtcgtgccgtatagttgtcagggatgcccgggagaccagagatgaggtcgccggcgccggtgaagctgtcgtcactggagctgtttgagctgctcgagctattggcgctcaggtcggtgggggagctgctggagttgaggtccgtagcctgcgctccgacggccagaacggtgagggccgcggcgatgcgcttgaacatggcggagtcctcgcaggtgggtgctccgtgagacgtaatgcaatgtgttacgttttcgcgttgccacactatgcctccgtgagatgcaaatggcgaaatgcattggtccagaggcgatttcgatgatgagtcccggtggacagggatctcagaactgagatctacttctctggtccaccgtgaccgtccacgtggaccacgatacactgtactgtaaaccggtggaacttctaatacccgtcccacccgggccactgcagagaaacattggacgttttctagtgagtaatggttccgtcggtatgcagcgcggaggagctgcttcactgggcggttcctgaaaactctggctgaacaacaggccagggttgctagaaatctccacaggctagcgaggctatttacttcaccgctcacaggaagcctcaacgcatacgaaacaatcctattaaaatataacgagagctatgcgtaggctgggatagctaaaggattttgtgtgaggtaatgccacgcgacaattctgggaaaattacgaaaaacagcaatttccactacattgggggtcaaacgaagtttcattaatgggagcttatgcgatgaccatcagctcagtccgataagggacgaggagagcggtgcccccaaatggtcgtgcaatcagccccactaatgcaacgtcgaatcgccccgcggacctgttaccatgtttgccgccagagtagcaaccgactccttgcagagtctggtgtaggtcttgaacgcatcggaaacccaacggccgtgaaactggatcgtgagtgcatccgccagctcggtacatgtgggttgctccgcccgctcgtagaaaatgggagctgaaacagcgtgggtcttcgccagcgctggttgccgcccgcttgatagcttctgacacatcatccgtcgcaatgcaggccggttttccgcagcggtccaggtacactgcagccggtatatcagcgggtaggtgtttccggacttggagaaggatcaaggcaccaaacacggggcacaagaatgggtgtcccgagcgtgacaacatcctcgttgcaggagagccgccttggtttgtcttggagccgatcaggcgcatacacaccgactgtgccttcgatggggacagggttggctggccttccgcatccagaaccgcgatgtcttgagctcgaacagcaaaccacatgaacgatccgccagtaattgccacgatttccgaccgccgaaggaggaaaaagaacgccaggcacatgaacccccagagggcttgctcgaagggctcagtcattgaaaggttgcggaagcacacctcgaggagtccgattgacactggtgctttccggcgcggaggtgaatcgagacggctgatgcccttgagcagcatacgaatgtgcgggtgtgcgatcgggaagtcatggccggatgccgcgaagaagtgccgaacaccgatgagcacggccatgatcgagtccctgcgaatgggacccccggacccgaaggcataccgaaagacgtggagaataaaatccgagatgtgctgcacttgagcagcgagaggcatgcccaaaagcgagggagcaatgccctggcgggacgtccaggtcgtccctttgtcaaggctcggcggtattgctcgaacgtggggtcggcaacggagtgcgctcggagatactctgccagatatcgatcagaccttgaatatccactgtcggcgacacctgcgaccatccgggagttagtgacgagaatttgaccgcatacaatgggttagcggcaatgcgggagccagcgtcggcgcgttcgttgtcagagccggccacgtgcgacgccgaaaaccgaagctggaacgaagtctcccaccagctaagtagccggataatcacttgagcgcgtgaattacaggacgcgagcttgttttgccatgcgaccgcagaagtgttgtcgatgcgaaattgaacgtggcgtgggcgatcgttgcgcgaggcaccggagccccaccggcgtccccatgcgtggaccgcgaaagcgcacgagagcagctcccgaaagttgatgacacgaggcggtccccagaaaattgccgacgatgtgccgtcacctctgtgacctggagtttgtatcggatgctgattggtggatgacttgggtacggcgcggctgtacccgtgtgacatggatggcgactgtgggagagaagtgatttctcgggatgaatatccagcgtctgaacgcagatgggcccaactggctggaagtgtgaatcctgggagtgcacgcccagaatttcagagaacactcagtccagccgcggactttcgcttacgatgagtgcctaaagtctggcggaaagtgtctctggagaatgtatcccagagtacacctcatcttgcagtggctcagagtgccccagaggatcaaattaccctgagaatcaacccactaccaccgtgatcatgcgcaggaggccgctaaacccgctaaaagtgtggctttgtggagatgcacgcaggcctgcaatgtagcagacttgttacccagagtgctgcacggaaacccagagtgccgcacgatgacccagagttcacctccctgagtacaggtgacccagagttccaaagatgattctctgggtttggaccataaatccagactctctatactgaacttaagtgtttcccgagccaacacccaagaatccccacagttccccaagattcctcagaattcccaggatttcagaagatgaccctgagtgtcacctggttttcagggattcgagtcagttcgaagccagtctgcaatcaaaatgatgcgtgaccttgaagaaccgtcatggatgcacagactggatacttttgaggagtcgagagggagttctgcaccatactaaaccaagtctaaggacccactattggcactttcgacgccgtgcgacaatggattcgcaagccgatcgcaagtttggaccgctgatcccaaggtatactcaagacaagacattttgaccccaagcatagtgaacagaagctatttgcccgaagaagaagaagaagagagagagagagagagagagagagagagagagagagagagagagagagagagagagagagagagagagagagagagagagagagagagagagaagtagctgataaaaaccaaacagagttccttttaccctgtactgcgcaagtgacttcggccaagcctgccgacggaaatccggaggacccgagactacgaccgcgggacgctaagggcacatcaacggcgaaggacagccgtctgtgtgggctccatcaaaactcaagtccagttaggtggtgaccagcgacggccttgagcttcctagggtgatccatctattccatatcctagttgggtcacttgctgtgctcgtcgtagcccatttcatatcattccagagggtattctggggtgctaggtagtcgcctccaggattttgtattgactgcttgtgtgaagggaaaggtaactgacagtgattgtattttcctcctttattggaggtggtgcgcgtttgtgtgagtctcaggggagctaggtccctgaatttcagactcgagtgagcctagtgtgtgtgtgacccaccgtccaagggtccaaaagaataagtgacggctagttgtagtgtttgtatactctgtatttgttggttttatcgagctaggagggcattggggtaaggtgtcttttgagttccaagtcccagagttgactgaaatcctggaccctgaattcgtgatattctgggtttcaagggatctaattctctgggttgccttttggtgtggaggtgcgttctgaagtagacgtgcgctcccgcacttcttcgaggctacattttcaaccggtggagtgccgttccgtcgaagacaaacgagccgacagggattacacaaggtacccacgccaaccaaggagtgtgattctcagggtttaaagctttgcggctgcgaatctctgggtatatcttcttgctgttgactctcaagtcgtttctctgggtctacctcttgggagcagtcttgggctgcgctatacgaacccccccccccctgggcgacaaaggtttcatcggcctcgcctcattgatatcgaagccgttgggcgtgccatccttaaaagccgcaatcaaggcacgctcgctgtccgagaactggtacgtgagggccacttgcgatgatacatccagcgcgcagaggccataatcggacgcatccatttcgactacaatatcgggtactgggagagcattgaagtattccagcgacacgccgttcaggcggggagtgtggagcacacaccaccatcatatcaggtcttgttgcatgtccggcgtaatcgggacacgctgaaaccgctgaagataactttcgtgtcggcgcagacgctggagaaacggccgtgcagcacggatgcatgttgcgacgcgccggaggctacccatcagcgacaggtaggcttgccttgaaagtgatgaagcagagtacgcagccgccacaatactgcgtgccttgattatcttctccgttggtatcgagaccgtttccgccaccgtgtcgaacatgaggcccagtacacgttggcgcgtgttccagtcggtgaacttcttagtgttgatagcgtcagctcccaggactgctgccatagcgtaccgtagggaccgatcaacgtcctcgcaggaggtgccaatgtccgcagccacattgatgtggtcgtcaacccagtgataattgaagacaccacccgggtactcgccagtcgtgtgtgaaccgtgcacgtaagcgacagcaccaccagcaatctcgtagaaacccggtgatccagtccaaccgaatggcgcagcgagctcgatcacgatgacatcgtcctcctcgatgtggccgccgaaaagatacacgctgttgctgtgaatgctgatgttgcggaaagcagacgccacatcaccagccatcacacacacccggacccttgggtgagcgcgcttggacctcaggatttcggccgccaccgcgtcgcagtgagtgtactccggcttggtgatgctgtcctgatccgtgtagtcgttgatggaagtgccttcgaggtatgacagatcgtggatcgtcctacccgacacgtttgcgtcctcattgcccttgttcaccaccccgaaggggctgataataatctcgggccattgcttgagtcgatcgcggtcgagtacgaggcaccgcccagcatcctgctccttgcgaatgttcttgcggagcacattaaggcgatctcgcgccgacccgtgatttggtggccgctgtacctgccgtggaggtgtcttgcttagccgaacttcaacgccgccctgcacgattctctggagctcttccagatgtgcgtaacttttgcatacttcgttcagcacgcctgggaccaggttcttgttaggacggtagtcatcagccgtctgtccgcgcaccagctccacaaaggctggtagtatcatgcccgactgtcgtgcatattccgatagcgccttttgcaacggggtgtccagaaggaactcgggtcccgccgcgcctggtcgcgacagcggataattgtccggcggcagtgcgatgccatattttgccatagcttgagccagagtagctctccgagacatccgcagtatatcgctccgggcacgggcgttcaggtgcatgcctgcagcggtcttgacgctgacgacggggcgcaggtagcttggccgcggcgtgatatcgttgcgtaacttggcttcttctagaggatggcccgtacttccttggtccggggtacacgatgccgaccccggcgagccgattatccgcgaggccggctgagtcgcagcgcttctcaactcactcccacgtggtaatggacacctaacatcttgtgatatagtgagaggtgacgctccacgtatatggtttaattggtgtaccggctgtatggccggcactggctgtatggccgtgggtgactgtatggtcgacccggactgtatagtcaaaggtagctgtatagctgtaggtggctgtatggccgacccggaccgtaaggtcaaagtgccagcgcaagcggcgctggttccgctggtgcccttgtggttacctggtgaagtcggtgttccggtggtggaagaggtcggacgaagggcaaaacaggtgctctcacggaaaattttccgctcgcgcgccgatctcccccttgttgttaggagccgtgggagccgaggggtctgcatgcaggcgtgacgtgacggcgacatggagctgagcaagcccttgcccgtccaccagcgcacgcagacgttccacctcatcttgcagctcttgcaattgcgcacgaacagcaacgccgtcctgaggggcgatgtcgtcggtcgccaccgaggcttcgttgggggtcgcaacagtcgcctcgagcgcagtgccgggcgagaaggaggccatgaaggagctcaggtcgaagccgctgtcggatctcggcgtcggcaccgcacgtttcgaggtcgtcgcggccttcgctggcttcgtcttcgctggagtcgtagtcttacgcggcttcttcgcaggcggcgccggcgccttgtcctccgggtcggagtcggagtcgtggccgtcgtcggccaccgctttccgtggtgcctcgccgccggtccctgccgtcggccgcttgaccagcttctttttgcccttgcgagcttccgtgacggcttcaccggagactaccttcgacgtcgcccgcttgctcgtgcggagcggggcggggtcggacgtgcgccttgcaggcgccctcgcccatggttcgtccgcgcccgtgacgtccacaacatcaggaggggctgagtccgcggcagcgacggcagtcgggcgctcgctgtccgacggggccgtctcgtttctgggcgatggcgagctggggagggggggcgccggcttggtcggtggttccacgggtgatcatgtcgtagtcttgggaggttaaggacccccttcttgcttgcttgttttttggtcttgattcgaagtgaggggagaacgccacgcgtccatcggttggactgtgggcggtcagggttaccggtataataccggtgtgtaccggtatatcgaaagtactattttgaagtggaaaacacaattccctggttctaccatggaatacagcttatcgtagctgtgggtgcgttcaatcctcgtaatatatttattttagggtctggcgggtggggctactttttcggcttcagtaataccggcttcagttgccgaggtaccgcctaattaatctgtgttgggctggccactgcactccctccggggttactgctatcccagaataacagggcttcgttgcccccccccccccagagtcttcaacgaatgtcgggcatgcttgcaataatttgagtgtcaagcttctaaattaaatgaccccgagtctcggatttacttggcgccccgggtgtgtaccctcagggtcatttaattcacagataaatgtccagtctcacaaatgaaagctgttgcctctaaatcggagatcatgagaaagcacaatccgaggcaattctttgagcaagaacaatctgaggctattcttcgttttaccataatatcggtattgtggtttatgtttacgaaaaaaactagggcttcgcgaaggctgcgatagcaattttacgggggcagctagctttaaaggcgtacgagcgcaaccgaagcttaactatatgtcgtctctcttgcgaagacaagacaaaggctcctttagttgctggtgacgacggcggcggagaggcgatggtttgtgtgggcgcgaacgactaaggacctgcgcgcgatgagtgcgcgcgtgcctcctgcggtgagcgggagtgcgagacgagtcaagatggcgacgaagaatccaagtgaagtgaagatcggaagacgacggcgtgcaagtgttgaagaagcaacgcggtggcgcgcaatgcgttcgtcaagtcaagagatgacaaggtcgacaagatccagctgcgatgtgccgtgcaagattcttagcagactcgcggcggagtgctgcgagagctgattcagtccgggatgatgtggcgctgtgccaacgtcctaccgctgtggtggcaacccacgactgcttcacgctgtgtggagttcgagttatggtgtggtgttgaaaggactgtctgcgaagatggagtgatgtgtgcgcggtacggctggagcggcgacgtgctgcgaggaattgtcgtgggagccgccagacaagcttggtgtggcagacgttgtgtgatggagtcactgaggacacacacgcacgcgtcttgccccagttgtctagcattgggggcagtgttgctagttgttgtgcctgctcagcggcatcaactttccttttgtcatgctcgagaccttaaaacgagtttgtcagcgctctatcagactcttagcactacacgattttgctacgatacccttgtcgaagactgaggtcgttccaaccgagattagctactcgctattgaaggtgatcttcgttaaatactctagcaagtccgaatagcttatctcggggcgtaggattgatctaatcggtagtttggcgctatatcggaaatttcacaatagacctgggaaaatgctcaatgacttcgcaaccacccagcacgctgtacttgtcggtcaaactggacacttccggccttacttggcgccggtctcgacatcaccggcagtggcgccgagtccacttgtgtacttaagtagcctggttaactaacaaacgacatgcatgcatacagtggagcttgaagaagcagtcgacagttgcctggttaattcagctcaatgaagcccagcctgcacggcgtgcgtctgctgctagcctgccgcgagcttcgatgcgaagaagcgtgaccgcaagcgttgcggtcctcatccgcagcatgttccgcatccgtcgcgacatcgaaggagtaggtgcaggaggggtgataatgacgcgacagtgtttagcatcttaaataagtgagtctaagtagtctacccgaagagattaagcgactttgtgtgtgctatgcactcgattagaaccgagtatagtcgtaaaatactgagtgacttcggaaatatcaaatctccgttgttttgttgctttccccaccatttcactttgcaacgagacaaatcactgagtgggcacaaatacaacaacgaatttcgcaatagatcacctactcggtttgagttctacggtactgtaaaccggtggaacttctaatacccgtcccacccgggccactgcagagaaacattggacgttttctagtgagtaatggttccgtcggtatgcagctgtcatggtatcatcaaggactgctagcagatcgtactcatcctagcttgaacgcgaaggctatcaagttgaacacggcaattagtagcggatagagttcgtcagctgtgatctactttcggctttgtgagttgacgttcaagtgcaagttgaggatgccatcctgcatgttaacattgcatgtttgtacgaagagttactgagtgagttgtgtaggctagctagaagaaaactagttagggaaacacgtctaattcaatcagatctcaatttacctgttcaagaacaactagtgctgactgcaacgtcgacggcatcttgcccgagtgcttcagctactactaccctctgctcaagtgctaccatacccatagcgtgacgacgctattgtgacagcagcgcggaacggacgtgcgttgtaagtagtagatacaaaatctggcgatgcaccaacgacaaacgacaccaaattatgtagacccagtacttcttaccgccgtcgaacgagcacaggggcttacgacattttttcctattatgctgagcagcaacttgcgtaccagcggcggtgctaaactattgcaatcaacactcaccatttactcaccgcgattaaacccgagtggagctttgggctcttggatagactcagcaggcgaggggttcgcgagcgaacgtatgtgtcatcaacttgaaatttcaagttgtgaacctcaggtgaacctcagcagtaactcgatagtattattgggggcgtggatgagttactggttactatagtgatagtacaatcagaaagtgccaagttactggttactatagtagaagtattagtactatagtactatattctactggcctcgcgaattactaccaagccctggttgcaacatttcatccagttgacaaatgaaacaattggcgggaacccgagttctcgcgatttggtcggtatcatttgcnnnanctcgggttnccgcaaatgataccgaccaaatcgcgaattgtttatttaatttttggcctccatattggtaccctcggggcaagttaaaccctcatatctaagtgctgtcgatgaaggactaccctcaaaatatgccacaggtactgaatagacccaaataacatacctttccatgtccaagtttatctttcatgagcaggaggatagcgatgagaccgggaagcactgtaccgctgcaccaggcaagcgactggattttcgtggagagacacaggacgagggcgaaggtaaattaaccttccgttcccctactgagcttcagctgcgttctatgtaggtcatagaccaacacttcaatgcatttgctcatacatgtgtaccggtagttttgggggatccggggtcccgatgggtacccgggttcccgccaattgttccaaatagaggaaatcaatcggtcatggtacagtttattgcggtggttatgtagtttcggtcgctggaggttctaggcagctctgcctgcatccaccatggaccagtgcgtatgtctacgcgaagttagcttccgtagctgcaagctcagtagatgagcctgcaataaaataggggttggaagagccaaagcaaccaggagagtcgacgctcccggtcgcgcatcgtcttccgtctaatgctgcgtcgtcacagcgggttccgcgatgcggcgcgccgcctcgaccgccgcggagctgtagcaacacggctgaggcgcctgcgccacgggcaaggccatctgctcgtcgcaatggataagctgttgcttgacaagcgtggggcccgtggcgtgggctccctctctcaggatcacgaggccgcggggcaagtccatggactggtcgatcctctgcatcgcgtcgaacaccatcgagagcttcacccagtggggcgggtacttgaacctggccacgtccatgagcagcaccatgtccctctcggcgtggtagccgccaatgggcgagaagtgtccgtctcccgtctgtccgagcaccttgcggctatagttcaacacgacgatctccgagctggtggcgcagctgtgcttgacaatgtccctgaactgctcgagcgtgaagtcgctcgtggccctgtagtcctccgtgtgcacgccgttgcagcgcgcgaggcagatgaactcggacatgctgatgcccttctccttggccacgctgagcgacgtgcagcagtcaaagagctcctcgctgaaccacctccaggggcccttccagaggcggcccgggtcgatttgcagcgcgttgaggcacatggccagcgtggccaggccgcagtacgcgggctcggcctgcgtgatgaactgctcggccagcgggaagtagatctgcatgtagttggtgttcgtgttgctgttgatggcctcggtgaagagcttgcggccctcggggctcgagaacgcgatgcagtcctgcggcaggtggcggcggtggaagctgctctgcacgccggcggccgtggacttatgcaccatggcgtgcatcttgtcgtactccttctgctggttgtcctgcgcctgctccatgcgcctccgctccgcgagcatcagcgcctccttctcctgccgctccttctcgcgcttggtcttgcagccgcactccatgtccatgggcagctggcactcctcgtccccctgctggcccgaactggcacctgacgctgctgccgagttaaccgccgactgtctcttggctatttggatactgcggaacggcttgtgcagaggcggaatgagtcccgaacttggtgtgtacttggtgtgctcgacccgcgggtcgaagcgggctgattgcgggatcgattgcgtcgcgggtgggccgcggctgaacaggtgggtgtggaccgaacccagcagacccgtgggcgacggaatagacgacgtcactcggacgcggacggcggtgctgtggcggtggtgcggcgcgcgcgcttgggccttggcagcggcggcgctgggcagctgcttgtcctcgcgcaggaagagcttccaatgggtcgtgggcgcgaagcgcgtgggcagctctcgggtgcggggccacatcaattacggtgctcggttaaaaatacttgaaaggcggcgcgtttctcgacgagattcgacgacgagtgctgtaccgcgcgtagttggtgccttgcagctgagacggaggagcggggtggcgctcggggcacaaatagccgaatgcgttgagggcttcccttgggcggaatcgaattggggttgctcttgggcaactgactcaatggctgttgcaccacgcacttgagcagagtcgtcaaacgggggaaaattccagaaaacggccgacttccagtctagtcaaaggatacaaagggcaagtgagagggggagttccaggacccctggaatctggagatccgtcctcgaccagatggtgggctgcacgggccaatcgcagaccggcaggcacgcgccttccgaccgcattgggcggaggcggcggggtgcagtgccgcctaacgacgccaaacgtgagcccttggcgtgctgcctttggtcagagagcagccagcgagatcctgatcgccgtcgccgtcggcgatacatgttcgccccgaagctcgtcatcctagtgtggtgtggcacacacaaaggcaacttcaacttgcttggccaaacgttcgaccttggccactttcgcttttgcccttcgaggcaccagggcggccgacgctcgagtttacgtgcgtgaggcaagacgctgaccttggcggccgtgccgctggaatttaagcgcgaaacgaccaagcagggaagtaactgcaagcgcgtggctgcacccactgggcgcaggcgacggcaaaggcagataccgcctttgcgttgagctgttgtgaacgctggctaatgttactcgctctacgctagaaaactcagtttcttgtttatttctttcgtcagcggagttgctgcgcgagcgctgacttaggcagcggggctttggcgatccgccatcctatcgccagcgcatttgtcagacgattcacaggcgaacttgtggtcatagtgccagtaacagtgatggcgagctccgccaacagaacggaggccggcagcattgatgcttgctcgagtgtatacgacgtctaacgacctgtgcgtgtaatgcagctatgcctaatacagtgtggatctcgatctagccaccaagtcagtgatcaaatggataagcagggttgagacaggatcgtcaacatctttccagcacgtcgcgaagctggtaacacgaatacagcggctgtgagtgatgctactggcccgatcgcgtaactttgatactagtatcgagcccgttaacctacatacatttgagtaagcaattagacggagaagacaatgggcagcaactacccacgccttttgaagcttacccgagaggtataatagtaaaccactaactgaatgacattttttaaatgattaaatgagccatgagaagtaaggggatgaagtttcctcttttttggctgtcttccacgtcaattggaggcctacttgttgccagtaccaagcctagactgtcttttccaaccttcatagtcgaattccacttcgccacgcagcagaatcagcacgttgtcattgtgtcgagtgagagcaatattcacataccgcgcagaccacacaaatatggtcactatccgactcaagaagaacggaacgacccgaaactgagcttgacgaccaatgaggtccaactccaagaacactcggtcctgcaggtcccagtagcccacgaccaaaacatcgaccagcagcaccacttcaaccagaaagaagaggatgatcccagccacaggcatccagaacttgaactgcagtcgccgcttcatacttggcgtcaacgcatcgaccgtcaaaatcgtgaaaactaagagcaaaaggctggccacgccacaagaaggagcccattcccagctgaagacatccgcgatgcaaaatcccgtggcaagggtttgagtcgcgaggaatatgaagtggaaggacaagacgatgcgtttcagtagctggcattgacaacagcaagcgaatatcccactgaagagaaggcttgataccagtccaaccactgcgatcaccccccaagtaccattaattctagacaggaagagggaaagcactgcaaaaagcgctcctattgctccagatgaataaatggctgcgattttccaggtggccagtggtcgaagcgtcccaattcgaggccaaagagttctccgagggtcgaagcggatcgattccgtagtaagacgcatttgtagcggcggcagtttggggcgttgatttagtgcagctaccaaagtcgcagtgtcaacgtggctcccactacgccctaattgcttttgctgacgcgacgcaacacgagacgtcgacggctctgcagcgcccagagcgatcttgcagcggtaccctaaagcctgcatcggtgtcccaggctcattgagctcgcgtttggcgtgcgcgaatctgcgatagagattccgcgccaacatcatcgtcagcgtccccactacgttgacaagaatgtctttggttgacagggtctggccgcgggctgtggtcgctgcgtaatggttcaccccgtcaacgaactccaaagacaaccacgttagcagcagcatgtaatataccagctccaacactacgatgatcatgatgaactttgtgttgcgtagataggtttcctgcagtaaagcgttgataaaattcccccagcaaaccaccacgagcgtagcgcgaatatcccccaagacaatgctgaacacgacggcccagatcgtgctggtagtatacagaaaccaaaagtcaaaggtgtgaaagatgatcttcacgtactcggtcctgaagcccgcggtgaagacgatcatgccgggaaggtgggcgatcgctgcaatgggtgcaagtattcgtccaagatttgcgggtaacgcgaaggtggcaaaccgcaagatgattccacaaatgaccgcctgctccgtgactcgagtgaacttcagtgcgactcggttgaacgtcttgacggcgctggggccgagcagcacggttttcaccataactagagggtcaaaagagggcaagtcatcgtaccaagcaacgattctaaacgattgatcatggtgatgagggtgattgctggcatcgacggggtcgagtggctcgatcatgacacaacacaagtcgtttgggtgacctggtctatctataatgctgcctcccctcgtggatatctccgtctgcgtagctaaatgcagcctgctgtcggtgggtttacaagcttcaactaacttatacctcgattttgaagcttgcgttttttgtagccgcttgtaaaatgtatccctccgcgagaaacgagtccgagctgccttttccagccttcatagtcgaattcgatctctcctcgcagcaaaatgagtgcgttggcgttctggcgagtgagaatcacatacaaatagcggcctgaccacacgaaaatggccaccactcgacttaagaagaacggcaccacgtgaaattgggcctgccgcccgaaaactgagaagttcaggaatacccggtcctgtacgcccaacttgttcaatataaagacgcccagaagtaggagggtgtaaactatccaaagcatccaaagcaggcgactgacatccagaatctgaagcgtaatcgacgcttcatggtcggtatagtatgccccaaaagcaaagtggaggtcataccacaaatcggaacccactgccagttgaaaatatccatgacactgattcgcgtggcgataatttgaaaggagaggaaccaatattggaaggacataacgagacgcgtgagcaattggcgttggcaacagcacgcatacactccagtggagagggagctcatcaccagtcccaaaactgcaaccacctccattccaccggtattccctgggataaagagtgacagcaccgcaaatacgccgccaagtcctccacaagcatgcaaacctataatcctccacgatgacagtggtgatagggaaccgatagcaggccacacagtctctcgaggatcaaatcggactgactcggtcgcgagatacatttcaagtggcgggtatgcattgcgttggttcagatttgggggtaaaataccgcttaggggcacatctgaccgacttagtgcgatcttgcatctgtacccgagcacttggatggcggttccaggtctacgattgagacttcggcatcggcgatacaaattccgcagaaacagcatcgccatggctccaatgacgtttgcgagtacgtctttggtcgatatcttgtgcccactggccgtgaacaaattgcaatgatggacgtcgtccaccagctccagtgataggtacggcagcagtgccacgaagaacagccactcccccaaagccgcaccgacgatgaagtacgacttgcgcaggtatgtttcttggagaagccagcacgtgaaattcacccagcaagacagcacgactatcatgcggaggtcgttcaatacaatacaaaacgtgacggcccacagagtgttagcagcttgtaagaagcggaagtcgaatgtactcgcgaggatcttcatgtactcggtgcgcatgtgggccaaagtaataatcataccgggatctgaacgatagcggatagaattcgacctgtgggcgccggcatcatgaatgttgcgaaccgtaagcctagaccggtgaaaatgcacggccccaggaagggggaaaatataacggaaaatgtacagcccatgttttcggattggagggggtgaaatggcccgcaaatctatcgtgatgcagagaccaaatcggcatcagtggcgtttgagaagcatgaacaacccgcaaacgtagccccgaagcaaggcttaggtctacagttccctgcctagcgctgggccggccttctaaaggttttaaggacaggtagagccacatttagcaactcgattaccgggatttgcaatagatttgggtgccatgacacccgtcctgaaaaccgaaacatgtgatttcagcatgttttacatgtttggagatcttacttggttttagtatgtctttatccctaaccctattccgaaacatgggctatagggccagccaaaatataactagaaaccggttgaaggttctgagcaggcctcccgattatggcattattaggtagtagtgcaacaagcactatgataaataatgcagggactgttttatcaaagaacaatacataattgctacgtctcaataccaccgaatcaataatgcattcaataatttctacgcaaatagtaactaaaccctccaaattttacatgcttatattatgtagaaaatgataatatgaagtattgattgaatataatggtttcaagtcgagttcaagatcgactgaacctgtgatcataccgaaaagacgaatactttttaagagtatattggttttatgttgcttgtattgtgcctttctgccaaaacgccctccgatttgaggtcctacgtaggactcttgctcctacgtaagacctcataaaagttagtaccaaggccagtaaaaccgtgcataaacaataactgaatgtaaagtgagcgatttgcttgcgaagggaggccaacaaattgtgcacagtatgtagcacatgtacccgtacgtagctccacgctggcatggtgacctagctgcggtgctgcctgagtctccgcctgtggccaaactatgcatttgccacagatgctgtcaggcacactgacgtgatctagtcctacgaagggctcgttagtcctacgaaggcccgaatggccagcttaacatggccattcggtccttatttccaaaaaggtaccctttagatgaagacggagctcctacgtaggacttccgtaatccgatgcagggccagcagcaaatcctaggtttaaccctaccctctccttcttaagaccacctttttgaggtcagattggccaaagtttctgaaaggcacaatattgctacatcaataaagcgctattacgagtcatacaccgaaataattgcagctcacatcggtaccgttgaaataaataattccatgagaaaaatgtcaattaatttttctactaattgatttttcgagaggcctggtcttagactgagtaagatcgtcttgagcatggggagggggtcaaacgtaggtagatcattcccccacgcgacgatcttgtactgcacatcgcgaacaggaagaggcttcgtctcagtcgcgcacgcgaatgggtggatcatggggataaagaggagagagcgatatgctcaccaacaagcgctatcaatgaagtgtccaaacgtggacagaacgcaataagaactacactaaaccaattgaccccgtttggggctgcaaaaactaccacgtctattgtttgtatggacaggttctactctgggatcgtcgagttcaacggtgatatcgcgcacttggctcttctccgggtctcacgggcgatgttggcttgcagtcgccacttctggtagtcgaactcgacgttccccctcaatatgatgagagtgttctcatgaacgcgcgtgaccaagatgtagaacagtcggccgtaccaaatgaaaatggtgacgactcgactccagaggaacgtcacgactcgtaattgggctctgcgtccgaggaactccaggtcccagaacacgcggtcgcggatgttggagaagtcgaggatcatcatgtcgagcagcatcagcagctggatgacaatgaagagaacgatgcagcacgtgggcgtccagctcttgacgtgcagccggcacctcatcgctggagtcaacgagtcgatcgtcaacgtccattgtgcccagaggtagctggctgccacgccacaggtgggcgcccatcgccaagagaaaatgtccgcgagacacaagtgcgcagcgatgagctggagaacgagaaacagatagtcgaaggacacccccacccttttgaacagcacgcgttggcagcagcaaatgctcactgcaacgaatatcgcggttgttgcaagacacagcgtccccatagcgtcggcacccctagacggtgggatgaagatcgagggcaccgtcagcacaaacccggttactgcacaaatgtgaagtgtccaggcttgccacccggttagaggttgcagtgagcccactcgtcgccaaagtgtatctcttgggtcatatcgcctggaatctttgacgagatgtatctgcaatgggggcagcaccaagctcgataaatgcctgctgtccattacatcggtcgtggaccttttggtctttttccgatcaagcatcgacttggaagagaaaaacagcatggggcccagtggatgaggtacaacactattgtttgccgacacccctggcccgattgggtttaacgcgatgaagcaccgatacccgagtgactgaactgctgtgcccttcatcttcttctgtcgcttcattagccgtagccgtcggtacatcgtacgaatcatcagagtcaccatggttccaatgacattgaccaacacatctttggtcgacagactgtggccgccggctacgatcaagtcggtatggtacacgtcgtccattatattgagcgagatgctgcccatgagcaatacgagcagagacgcctcgacaaacgccgacatggcgatattcctcgaatctcgaaagtacgtttcctgcaggaatgaacacccgaaggccacccaaacggccactaccagcatcactcggacgtctcgcaacacgatgctgaacacaatcatgaacatggtgttggccgcgaacgggaaccaaaagtcaaaggccgacaggattagtttcacgaattcgactcggatgccggcgccgaatacgatacacggcggaatgtgtagaatggcagccagtggggctaatagtcgccccagtggtgccggggctgagcacacgacaacgcgcaggatgaggccgcagccgtaaatgggcatcgtgagccacccggtcttgcgcaggaaatactcgaaccgcttgagatgtggcggccttaacaggaccgaccgcagcgtcggtactgggtcgaatgccggcagctccgtgcagaggacggtctcgtagctaagggccagcggaggcggaggctcgccggtcgcgaacggccggatcatgtgtgagaagcaccgtcagagtcgagtccgccgtgacctggccggcatgttggcacggcactgatggccaactatttttactaccgaagcacgaggaaacgaccaccatgctaagaattgtcggcatttgatggcgaggtgaccagcacgtgagcgacaagtaggtgatgccgtggcaacgagaagttgctcagcatcctagctttctcgttgcacccgcgatctcccgccgggtgtttctgccgcgagtgccggcgagcgttagttgcaggagctcgcagcagcaccacgatgcggtgcccgatgtgccggcagctggttgcggcacttaacagagctttcaagctcagctttgcagcgatctcacgaagaagctgaaggctggcccgtgcttgatggcggcgccttgaccttggcggccaagggccaagttggccgcgctctgcaaggcgtgggtggcatcgtggaggacaggccagggacaggctccgtttcttccgacccctgtgactgcacgcttccggcgaccgtcgtcctgccggcgaagccaggtttcgaggcctcgcgacgacgaccgacacggaggcttgttgctgcgtgagaatccatcagcgccagcgccacggccatcaatggcggcgtcctcggccgagtctgtagaggtcggcagccgacggccgagctgaaaggaggtggacacccgcagtcaacctcgacgatacaccatgctaccgcagggggccgcttcgctgccgatgacagatcctgcgaaggtatccacctcgccccatcacggccttgcgcttctcgcgcttgcactgcaacgcgttgcactgcaagtcccatcgcgttcgattgctgaggagatgcgcgcgctcggcgtcgttcgttcggccggcgaaagtttcggctggagtgaatgcggcgaccgagccgatcggagtccaatgtggcaagcagcagcagcagcaaggtaaagatggcagcgttgtgccgctgcaagtgcaagtgcgagccgcggccttcctcgcggctatcgccatcttccgtgagtcggccgcatcccacgccttcggccgcggccgatttgcaatcgccgtcaatgcacgaatccaattgttgcaccggcccgcggtgcaatgccttcaacgcgtgtcctcatgagtgatacagacgcttcaagcttttgcgtgcgtgcgctggcccggctgggccgcggggtcagcagatcgcgatgaacgccatctcgcttgctgcttctacgcacactggttgcgccctccgagcgccatgtgtcgacatccttatgaatttttcttgtcggataaggagctcgtcggctggcctggtggtcgaccgcgtccgccgtcggtggcggcccagctcaacagcaacgcggggcttgctttgcctgcctgccggctaccaaaggaatgacgaggctgtgcgtcggaaaacgaaatgatggaatagaaaacatcggcattaccatgacaccgtggacatgtattggcatgggagttaatatgttcatgaacgcgccacgacttctgctgaacaaccctctctccttaacttaaaagtgtctgtgcgtggcgagttccgctctctccgtccctctctctcttcacttaacgagcttgccgttgtgtaggtcgcagaaggcgccccgccggatcgtgttgaagcacatgtgcgcttgacacttgcggccgccgccgtgcgagaagcacttgccgttgccccggtccttcttgtcgcagccttcgacgctgcaggaccgcacgccgccgtgcaggtagcagaagccgttgcgctgcgtgcccttctcgcacccttcgtgcatacaccgcttgccgccgccgtgggcgcgacagaagccgccgccctgcgaggacttgctgcagccggtgaagctgcagcgcgcgccgccgccgtggcccttgcagagcccgttggactgcgcgcgcttatcgcagccttccatgcggcagggcttgcccttgatccagcggccgtccttgttgaggaaggtgccgggcttccgcaggcacgggccgttcatggccggccggccggtggcgccgatcagcggaatggtgtgcggccgctgctgcatgagcgcggtgaacgacgtcggctgcgggacctgaacatgctggatgcgctgcggcatcgagaaggccatggggctgagcacggggatggtcacgttgaggttgccggcatgccgggcgctgccggcggcggcggcctgctccgtgttgaggctgcacatgatggcgtcgatgaggtcttggtccccgaacaccgaactgagcgacgtgccggcctgcgtccggggcgtcgggttcgaggtcgggttgggccggaactcgaagggctcgagctcgccgcggaaggaagaagtggtgggctcctgcttaatgccgaagacgccggcggtcggtgccggcttggccggcatgtcggcaccggcaggctgctggaggtcggggcaggacgacatggaggctgtggaggacgaggacgtcgagcggttgtacacgggcgggaacatggcggagtcaacgggcgagtcaggggagatcaggcgcgggtcgaacatgctgtggggctgcggggctgctggggtacgaatgctctcgaaagagcaaagcgtgggtatctgtcgtgctgagcgctcgatggatttggaaatgacagcgggggggcactgaccgacacggccggcaagctgtgggctgactgtgaagaaacgagccccgtgttgtaaacgaggctgtggcaagatggtggaacgctacgcttatgtgcgggcacaacttgaccagccggtgaaggtgtgtcctgtgaattcggcaaaatgccaagtggcgcccccaccagggggcaatgggcatctgccgcgacgccatgcgagcgcggcagtacccacgactggatgccgctgatccgttgagtgccggcactggcgccaaaggctgcagtgtgcacgttgttcttcttgcctgggcttgatgtttttttggcctaaggttgttgtatgattgcgagaacaacagatccaatatcccagaaaaagatcttgaaaattgtatggaaaatgttgcgggtttttcaaaacgatgtgcagcgcggcattcgtcaccgtgaggtcgagcgcgatctcgcggcatttgcccttgatgtgaagtgtgaacggcagggaaaggagcggtcagtgcatgggctgtccactcgcccttatctactgtggcaggttagcaccttcgtggccgcgcggcggataagagtaaggtagcctggatcttccaatgacaagaccctggctagctatgctttgtggaagaccgtagctgaccaagggctttacttgtggcgtccaaagtggtgaaccccagtcgaacgctgaaacttggctcaggcttcgcctagatatattcttgtgttgaattgaaacagcatgacgtgcatacgaacactcgttgacggtcacagcttggagttgcattgtggaattactcacgcttgtttgcattttcacatgtttcaacacgagaaaggcaactttgtgtacagtgcccgctaaaagcttaggcttcaccaggtactgtaaccttcgcctgggcccacccgatgaagtcctcacttcgatgccttgctgagtgcatggtctgcagtggcaagacctcaaacggggctggaaaacgctacgctaaagtggccgcaacagtccagtgaaaaagtcaacatgcatataagaaatgatatgttttcggacaagtgcattgcgtcactgccatcgctgagctggctgcaacaaacgagcctggcgagcaaagtttggcgccgcgaagtcgcgggcaaggtcaatgtcgcccatcaaaacgctaagaacggcagcgcgctgggccgggccggcccttgaccagcgcacgcacccgctgtcattcaagttgaacacctcaggatcccctgcagggatgtggagattcgagcgcgcgtgaaatgagtgttgggggatcgacaagctcaacaaagtcttaggagaatatccaccccggggcggcgcctggttgccaagtccggacttcatttccaacgtggcatttttcactggactttcggcagcgtagcgcgaaggatccgccgagatgataactctcgctcgctctcccgcagattgtttagtgccaaggacagccagagatcccacggcaaattcttgaacccgccgatataagatgtttggcggttaccagtaccagccagccagccatgccaccgagactcgcgcaccggcagaagcctgtacagtgtagctgtagctgctgcatcgaggctgcctgtgcggcgttggttgttcgacctcttgcgtcggaccaacccaccgtgccagtcggcaggcgaagagcaaggtacatagtgctgctcatgctttgggtgtcctacacttttgcgactaggatcatcatcttgtacgcgccatcgcgatccatccacgggatcaactagcaacggtgcacccctagttggcaactcaactcaactacagtagttgcacaagttgctaacagcgacttgctccgggtgggcccctaccatcgagaaccaacttcgacttcgcgatgaagccaggcagctcggctcgatcattgctatcgtagtgagcagcacccacgatattcttcgccacgacgccggtggccgaaagtgtcgccaagagtcttcgctccgataccgcggccggtgctgcccagcatcaagctcgaagagaaaagggtctggtaaacatcggctggcgattcgccggtggcgattgtctgagcagttcagtaaacgcgcgcggcatctgtcgtcgctccagccgatcgacagcaagcgaagccatgatcatcgtcgaggtgatcagccccgtcctacaagttgcacgctgcaactacgaccccgcgctgcttccggggctggcatccctcctgaataggcgcacgccgctcgcgcgctgctgcaaccgacgcgggcgtggcgggggcctccagcttcgactgcgagcttcactctggcgagctgatcccttcaccaccgattcaccaaactttggtccagacgagcattcctttcgccatgtgctccgcctagcagctgggcccgcggtattctgggtccaacttgccactggccgacacgcgcttctcgccactctccactccttcttcctcgccgccggccacttcgcttcgcggacgcgcagccaagcagcgcagcattagcatcagctagctacccgatacattcgaagagcccgaaaggcaggcaacgccggcaccagtctctcccgcttcgtgtgcaaaaaatcaggtgagcttggttcgaggtttctcatagccgaaaggccgcatacaaaccgctaatgctcgcccgtagtgtagccaagctcgataatttggcgggcaacttcaacaggaaaccgccaggtccatcctacagcaccaagaagacgcctgcctgcctgcctgcagggcacagaccggcggccatggacgaggtggcatttgtagaatcgctattcgcgcccgagatgcggtcggccgtcgccgccccctccagcctgttcccgtcgccgagcgcggccccggcgtcgctgcagtcctgcggcagagtcaaggcgctgctggtggagcgctgcggcaacggcaacgttccgacaccgcccggcagcagctccggcatggccgtgccggcaccgcccaactcgctgctgggcggcggcatcgcgctctcgcagcagctcacgctgcagccgccggtggccgacgacgcgccgctgttcgtgcgcctgaacgaggacgacatgttcacgcagatgctgagcgaccaggactttccggacttcccgcacagcggcagcggcaagaagacaccggcggccaagccgccgtccagcagcaactcgctgctgctggagccgctggacctgccgcgaaccagcgccgcgcccgagcccacgacgctcaaggacgccttctacagcgtggccgaggcgccgcccgtccactaccagcagttccgaccggcccatcgaggcggcatctgctcggccgccaacatcaacgtcaacgtcaacttcggcctggacgccagtatgatgccggtgttccccgtggccaacggcgtctacttcggcgggggcttcgcgggctatccgccgctgtcgccggccacgcacggatggattcaagaccagggtcaagaggcctccacgcccgggggcaacaacttccagcgagtccacacgatgaagcacatggcggccatggccggcctgggggtggccatgtcttcgacgtcgcccatgatggcgcagcaccaacccagtccgggggcagtagacatgttcagcccgcagcatccagtgagtccgggcatgtggctctcctcgttgaggaacgcgcagccggagacgcaggaggaccgcaaacccgtgggcctcgacgccatcaagacgtcggtggagcggccaccgttctcgttgaccatctcgccgccggcctcgctgaccaacaaggcgctcaaggagctcatcgtgtcggccgacttcgccacgccgcccttgatgtcgcggccgaagcggccgagggccatgaaggccgagcctggactaggcgagcccagggccaaggcggcccgaaccacgtcggcctcgcccgtaagccaggagaaccgcagcggcaacgtcgcacccaaagtcaggactaccaagggcaagaagtgcatcgaggctggctgcacgcggcgcgcccagtccaacagtcgctgcaaggcccacggtggcggtgctagatgtcagtactccgggcccggtggctgcaatcggagctctcaaggtggaggcttctgtcgcgcacatggcggcgggaagcgctgcgagttcccgggctgcacgcgcggccagcagcgcaaaggccgctgctacgtgcacggcggcattcgcaagtgccagtacggcgcgtgcgagaagaaggaccgcggcaacggcttctgcatctcgcacggaggcggcaagcgctgcgagtacccggactgctcgagagcggtacgacgcggcctgctgtgccagatccacgaggcgcaggagaaggaggctggagatggcgtagctttgtaggtgtgaggacaggatccgtgttgacagtagtaagaagaagacaaagaatgtgtacaatgatacttagcagcttatattccacctctagtcgtgttgctgtattcgctgttcgagggcaggaggcaaggtcggaacgacgtggtggaaaggctggctcgggcggtgcaacactcggattcaccagtctcgcgtctcggtgtatcgacctcaactcaactcattagtcgcgcgactgacgccagggagatgctgggctacatgtagcagccttctcacgacacgatcttgtcaacctggtcaacgtcttcgacaccctgactgacggtgctgcaagcacgaaatctcgatcgcaagccatacggacaccgacgcaggctctaggacgtcgatacaagattgctctgggctgttgagttctagtgtcgcgtctcgtcagcaaacacaataacgcagtgggcagtcccttggttgctgcattgaaccaacgtacttgcaatctagtctgatcactgcacgatattacacgcaagatcaagcgaagtctttgcccggtacactttggcgttgaatggtcctgagagggtcactataggcttctcttttccacctttccaagtcgaattccacattgccacgaagcaaaatcagtgcgttgtcgttgtgcctcgtagctgtgacgaacacaaagcggcccgaccacacgacgatcgtaataattcgactcagcatgaacggtgccacgtaaaactttgctcgttgaccgagtagtgtaaagtccaatagcactcgatcctgcagattccagttgcccagcaccaggacgtccagcagcagcgcagattctaccagccagaagaggataataccccctaccactgtcgagtactggaagcgaagtcgcctcttcataacaggcatcaaggcgtcgacagtcagaacggagtaagccaacagcagactcgagacgacgccgcaggttggaatccaccgacggctgaagatgtcgatgacgcaaaaggctgtggcaatcatttgagtcgtgaggaacaggaagtggaaggaagtcacgacgcgcttgagcagttggcgctggcaactacacgcaaagacgccagtgcatactatgctggcgacaacgcttaagacggcacttacgtctgccccgaacgtattttccggaacaaacatcgaaaacgctgcacaactccccccaaccatcccagagccgtacaaaaagacaagtttccacgatgcaattgctgccagactcccaatgcgaggccaaacagtgtcgcaactgtcgtacgcgtacggttccgatgcgagatgcatttgcatggggagatgccttcctgagttcacaactggcggtgttgctgaggacctcatacttcctgtaggtctgtcttgatggctcgtgaggtgcggtacgatgctgtcaaccagcgggccggacatcagtgcgatcttgcacctgtatccgagcgcttgcatggccgcttcgggctggtttttgcggtacttgacattctggtaccgtcgataaagattgcgaagcgtgaacatcgccatattaccgatcacattcgctaatacgtcctgtgtggatagttctcgtcctctagcagtgagtaaagtgtagtggtgaaggtcatcaacgagttcgagtgacagcgttggcagcaacatgacgtaaaatacccattcgcacagagctaccccaacgatgaggtacgaagttcgcaaatatgtttcttggagcagccaacacataaagtttagccaacaaaccagcacaaccaagacgcgcaggtcgttcatctcaagactcaacacgacggcccacagagtgttggatccttgcaagaagcaaaagtcgaaagttcgcacgatgatcttgacgtactcaattcgcatatcagccagggctacaacgatcccgggaatgtgaagaagagctgaaattggtgcgagaacacgcgcttcgtgcaccggtagtgcaaatgttgcgaaccttcaaacgagagcgaaaaagacaaatggcccgagcagcgggctgaatttactcacgatttggtcgaacttttggacagagctcgcactcagaagtacagtcttgatcttgggaacgggatcaaaagctggcaggtcattatcccacgccacaaccttgtagtacacgcgcccacagtatgaagatctgctttccaaagggtgaatcatgctcggggcacgtagcgtttgaaagtcaaccaacatgctatttattcatacgaactcctgcaacggccgctgatgctcgagtgtggacgcaagacaatccacccggtacagaataaacacgtccggaattggtggacttgtatcgagtgcttcgctcatactattttcattctctctagatgccggtaaaaatggaagtacaagtttatgttagctaccactctacatgcactccatgtagtatgctcaatggttgcaggtttcaagtttgaactaccttcattcgccacacggcagaacaagtacatcgccattttgtcgagccagggccatgttcacaccgcgcagaccgcacagagatcgactcaagaaaaaccgaaattgagattgatgcccgataatgttcaactccaagaacactcggccctagagcaacataacatcaatgtgggacatccaaaacttgggcaacggtatcctccgtcaaaccggactctggttagggttcccaaccaattgagcaacgtatcttagttttttagagaagaagaagtgttcgattaccgattcatggcttctcgatttatgactaggatgctacttattcgacaaaagttcggaacaccacaccagtgcgggatgttttagcatcccgtaacaagtgtagttgtgcatgccgaagcttgaaactgttgtcatgtctgctgatgaagtcgccaaattgtttggagtaccgaagccgttgtaaacgagaattgaacttggtttgatcttcggagtttgacagtcttagtaggcgtcgatagttggagctgaattgctgtaaatggttgatatcgctgtttcaaggggttccggtccgatcacccttcctccaaacaaagtttgttcctctcagtccattggcgatgaagtgctgcgcatctcactatattccataggtaaagcactgcctctctgcgatgggaccatgctgaccgaatttcctgcttgtgcgggagtgccatggaagtccagctgatgcctcctacgtaaaagccactgcagtccttccagagggctttccagatttcgtttgagtggtggcactcgaggaaaaggttgtagtgttgcgcagtttcaattgctgtgcagccgtagtaagggcactgctgaacatttggtgtctggtgcgctagaaaccagaatcgagaccttacaggcaacagtcgatgtggaatcctcatttgacgtcatcctgcacagggaggagcaatttccgctgattcttgcaaaattggacatcagagacacgtgtaccttgttagccacgacagacaggatgctcgtcacgttcttgagatttggggcgaaagagtagctttagggtcgagcgttgaagaaatgggaacaaggttgtcttgttagactttttcacagccacgcttggagtgaatccgcccgcagacctcgtgattccaaagccgcccactgcgatttcgacccgatgaaattcttgcgtgagttcgtaataaagcccacgaagccagtgccgatactgttcgaagctgtaggtattctcattagggtcgagtgtttttggaagaaaggtttcgatactttgccagccgcagaaagcatcgtaaatatcccgcagcagtgatggccaaaaatgtattgcaggtattggcatttaccaatacttattgcaatgccatactgcaagcttgcaagctattgcaatacatattgcagagcgctgcggaattgcaattcttgttgtagtcttattataagccaaccgaataaactcttcaaaccctagtacttttcacttagaagcaggcaaagcggtcaatgtcaagataatagcgttctcaaaaggcttgccctacagcccatgtttcggaatagggttagggataaagacatactaaaaccaagtaagatctccaaacatgtaaaacatgctgaaatcatggacatccatgttcggttttcaggacgggtgtcatggcacccaaatctattgcaaatccctgggaactgggtaatcgagctgctaaatgtggctctacctgtccttaaaacctttagaaggccggcccagcgctagacagggaactgtagacctaagccttgcttcggggctacgtttgcgggttgttcatgcttctcaaacgccactgatgccgatttggtctctgcatcacgatagatttgcgggccatttcaccccctccaatccgaaaacatgggctgtacattttccgttctcaaaatccagttcagacggcatatgtacctctacggcgacagagtagtatggttatagtattgcagtaattattgcaagaacgaccagtattgcagttattattgctggctgccttggtactgcaattcatattgctacagatcgctttacctccaatgccttcccgtacatttttggccatcactgtcccgcagacacgcggacgagaactttctaactacgtgagttctaaagctccaacgaggctcagctacagccaccagattccttcgccgaaacgatcgagtctcgtagtgtagctcgggcgactttgagagccaaattggggctttcagcaacgtggggtttttaaaggcaggcataacgagacccaaccttacgtcattatgggtcactcgtagttagatattgatagcgcacgccggcattttcgactaggatgattcatcctctggagccttcaagccaacgcgcgccttctctgactagctgtggaaactaccaggtcgttgctctggggcggcacctgccagcgttcgacccattaatcacagtcaagtccgttcttctgagtccaagttccgtgaagaagtacaattatctcgtgtggaaatacagccacctcgttcagcagacggtcgtagctgcgatcgccttgcgactcgcagcctttgccgtccctgcgtcaatggggcgaatcatcgctccaatgtctgcactctttcacatccccggcatgacggtgttcgtggctggcatgcgcaccgagtacatcaagatcgtcgcctgcacgttcgacttctggcatccagcttgccaacaccatttgggctattactttatctgcagttttaattgacctgcgagtaattcttgtggcgacttgctgggtagtttacaccatctccctcttccaagaaaccaatctccgcaccacttccttcatggttctagtctccgtgtgggagctgatattctgtttaatgctgatggcgtggttgtctctgggattagttgaagacgtccaccaccacgctctgatcattgcgcggggccatactctttcgactaaagacgttctagccaacgctctcggaacaatggcgactatgacactaaggaatatgtaccgaagacagcgccacgtccagcgacaaaggaccaccccggagaagcgcatggaggcgctagggtatcgttacaacattgctctgagcatcatggggtatcacgttgaatctactggaagtgtcaaagtgtttcaaggcagcagtgaagcaaacggcacccgtttcttcaatttaactatcaacaagacaaacccacgcgcaagccaaggcgagaagcgcgcactattgcaaatgtatctcgtagcggagcacgcaaaaattgatccgcatacaacagtgtggccgcgtattggagcactggagcccatctcgatctggaaaagtcttgcgctgtattcatgtggggctatgggtggtggtcttgtcgcactctcagtttttctatcggaagatgcctccggagctgcagaaaccgctgtatcggcacttttaacgagtattttctttagtggggttcatctgtgctgctgccaacgccaattgctgaaaagtatcgtgacgtcattccatttcctcttcctgctgtttcagattgtagcaattggcgtgtgcgtcgtggatatgctcagctggcggtggcactgcgcgtgcggcgtcatgtgcagcggcgttttggcgtttactgtcctgactatcgacgcgctcactccggtcatgaagcagcggcttcggttcaactactggatggtggttggcggaattgtgctcttctggctcgtacagatggagcttctgcttgacgtcttggtgctgggtcaattggatctgaaagaccgagtttccttggattttgtagttcttggaacacattcccagtttcacgtggcgccgtttcttctcagtcgcgtggttacagttctagtgtgggccgtacgctacgtgtttgtggcgctgacccaccacaacgacaacgcgcttgtgctgctccgagggaatgttgagtttgattatgaaaattggaagagactgacgagttatggacctgttgagcgtcaaagaggatgacgcccgcttgtatcatattcaagccaggacaccagctcctgctatcctcgtttcctcgccagattctcattttaactatcttttggagccggctcttccttaaaaaaattctcgaactgcatgtggtccgacatttcgtttttttttctttcagtacaagcttatgctgaaaaaggaggtttagactggagttcaattgcctggttgttcagtgcgggcgtgtcttgtgaatatcgtacatatcgctcgtattcacatgtcaagatttgtgttatccgggaaagaaagtctatttaacccctactgtagttatttgctgggtaaagttaggatcattttaacagcccatccggtgccagctcgcttgatatcccgccgctacggtaacgacagataatacagtatccctgtaaaactaagagtctgcactaaacaattaattcgcagcttatacagacagccctcttcctagtgatagtgccgtcattttttatgatttttttgtgacccgggcaaatgagccgagatgttaattaaagcgagtcaaacttgaccagggggcttataactagggattaaacagaattcctttcactgcggataacgcaaagctggaatacgagagattggtacgttattcagacgcgaatgccaagtttctggagtgggagaaaaccgtgatcaagtctttcaagaagaaccccgaagcggcaaacttggtgatgcagtcgacgatgaaagctcaacttgtagacgaaccgctatctaagtgcctggcaccgggtcgatcgctgtgcgattgtaggtcgtccagttctcgagctgggctagcagcggcaaaacgccagacgacgcgatcggactccttgggcttaatcgcaggcttttcgtcagtccggaattccgcagctggatcttgtatttgagcattgcgaaggcggacaatccagacaagatctcgcatgtgacgatggtgcactcgctgatagctcatcaaggagacgaaacagtgatagatgccacgaagaaagtatctagcacgagtgcgattgaggcaaaaccggacatagtactcgtctcgcaatggattggcgaaaagaaaaccgggatcgaagcgttcaacctcctcaaactggatgaggcggagactagcattttccagacgcctgcattccacacctgggcccaatacgccacagagatgagaaaaacgcgttcacccaaggtcgcgcttggcatcactttggcgatactgaagaagcggtttgatgaggtggacctggcaaaaatgcttcttgtcgcgaagcacactgcagcgcacgacgttgacagaaacattctcagcgaattacagaggctgctgttcaaaagttggcgtgcaagaggagaagatttcgaggccgtggcaaaaaggttgatgtttacgactggtactgacgaaaggaccgtaagtgttgttgccgactacaacaattttttacacggttgacgccttggtacgtacacgtgtaggaaggagtgtgcgttcagggggaggggggtaaccacagctccagtagtcattgggtacctaatttattggttgtgatgcaattcaagccacaacacagtattggttagtacacgtacctagtatctcatccctttaatccagcgattccaaatacagcacaacacgttctgctttgtcgcacttgtgcatcatttgcatcggctgcacgagtattgatattgcacttccacaaatgctcgcgcgccgtgttcaacctacggtagcatgtccggcctcatccaccccttcactaacgacgaattttcctcgtccgacagcttcagctaccagatcgtcccatggaactactacctgcctgaatttgaccccctccccatggtaaagaccatcgtactacgccaaaatgccgtcaagcgctacaaccggatcgtttctgccatccttcctctactcaagccatttgtatacaccgcacttgtgatccgctttgccacattcgcggcgccagcacatatcgggagagttctagctccgatctcagtgttcttgcacatgtttggaatggtcacgacttcagcgcaactacgcaccgagtacagtaagctgctattacgtactttcgacttttggttcttacaagctgcgaatacgatatgcacaatcgttctgagcttcgtgctgaacgacctccgcgtagtgctgatcgtcttctgctgggctgacttcacctgctggctcctgcaagaaacctatctccgcaattctcacgctatcgtggtcgtggccttggccgagtggttattttacgtgctgctgatggctgcgattgcgttcgagttggtggatgaagcgcaccattatatactaatcgcttcgtgcggacggacgctgtcgacgaaagatgtactggcgaataccataggcaccatgacattgatctcgctccgtaacttgtacagaaggtatcaagacgtcaagcacaaggaagcgaagccgaatacagctacgcaagctttgggttaccgaagcaaagtcgcattgagtccggctgccccgctgacaggttcaattcggagtagcattgtgccccgagacggctgccgagacgtaaatcctggtacattatcgaagccaacatgccggcaaactgcacgtccattgctgcagttgtacctttctgcagaagctgtccggtttgatccaagtcacactgtgtggcctcgcgtgggagcgttaacaccgctctcgtcatggaaaatagtcgtgctgtacttgtgttgtgttattggtagcacatgcgcagtactcgcgctcctcttcccgaaatatgcacttgggcacgaatttgtcgctttaacgggcttggtctcgactgccatcttcaccggaatctacggttgctgctgccagcgtcagttgctcaagcgcatcatcacttctttccacttcctgttcctttggactcatatcctcgcactcggtctgttgctgctggagatgtttcggtggcgctgggttccagtctgtggtgtgggctctagcctcttgctggcccagacggtactgacgatcgacgccctgaccccgatcatgaaacgcagactccacttccaatactggatgccagtcctcggtattgcgctctttttgctggtccaagtggctatgctttttgacgtcttcacgctcggacgtttgggcttggaggataaagtgatcttggatgttgaaattcgtggtcggaacaccaggtttctcgtcgtcccgatttttgttagccgcgtgttcactggtgtcgtctggtctgggcgctacgtgtacgtggtgctaactcgccaagacgacaatgctctcattttgctacggggtgaagtggaattcgactatgaaggctggaagaagagagtcaatcttgatgaacgctagaggtgatttttgacattgcggataaaatactttcaacagatgaataatattgagtagtgtagggtagatactactcggaactcgggctatttagctggtctattttgttcttggtggtcgaagtcggtactcagcttgtgccatctttatcgtgttctgtggctaaatccgcaacgcttgactttcataaaacctgttaacgttcatccgctggtgttgattaagtcgtttagtttccttacgcggcatgatccatccgtcggggcgcagcagtgcgagcagctccgcttctcctaatgccgtactgtatcagattgtagcctgtgaggaccaattgcccgcctttgaccccctcatgctgaagacggtgcttctgagccccaattccgtgaaaaaattcaacttcatcgtgctcaagctccagttactcgtcttccagtctgtcatcgcagcaattggcctgcgctatgctgtattcgcggccgaggtctcattaggacggaccctcgctctgatctgcgcaggcctgcacattcctggcatggtggtgtttgttgcgggcatgcgcgccgaatatctcaaaattattttacccacattcgacttctgcttcttacaagccaccaacacgctgtgggccattacactcagtattgtgctaagagacgtccgcgtggttctcgttgttgcgtgctgggcgaacttcaccaacaacctcttccaagaaaccaatctccgaaataccgtcttcatgataacgtttgcactgttcgagtggcttttcaacgcgttgctgatggtttggctggctgtggggcttgtggacgacgttcaccactacaccttagttactgctcgtggccgcacactctcgacgaaggatatactggtgaacgcaatgggtactatgtccatggtggcgttgcgatatctcttccgacggtaccagcacgccagacgccagaagaagaagcgagacacagcaatgcaggctctaggctacaggtgcaagatcgcgttgagtgcagttgaccgcgcagcgtcttccgccaacagcgacatcatgccacacgtcgaaattcgggccaaacctgaaagagcgtactcaagtcgtgtaaacaccaacgttttggcctcgaaaaggcggaaatacccaccgttgcagatgtacctcgccccggaagtcacacgattcgacgctcagaacacggtgtggcctaatgacggcgtgtttaagcctgttgctacctggaaaattgttttcttgtattcgtgcggagttatgggcagcgcgtttgccgcactcgcactctttcttccgaaaaataccaagaatgccggggtaataggtgtgtctgggctgatagtgagctccatattcagtgggatttacttgtgctgctgcgagcggcaactactaaaacgagtcatgagctccttccacttcctgttcttcgcagcccagatcctatcagcaggggtgtgcgtcatggacatgttctattggaggtgggctcctgcgtgcggcgtggtctcgagtttgctgctagcgtacacaatcttgaccgtcgacgcgttgactccgatcatgaagcgccgattgtgttttaagttctggatgccggtgactgggatcgtagtgttctgggcggtggaggtgctggtacttgtagacgtgatgcagctcggcatctgggacctccaggaccgcgtgttcctggatatctcaatgttcaaccatcgagcccaatttcacgttgctccgttcttcttgagtcgcttggtcacgatcttcgtctggtccggacgctatgtgtacgtcgccctaacttgccaagatgacaacgcgctgatcatgattcgaggggaggtcgagtttgactatgaaagctggaaaaaacaagccagacttgcgaggtagtgataaactgtagtactgcagttggaatagcttgagtgaatacggctgcgccttgggctgggttcgaagtctcatttttcttgaattcctctagcttctagagcctgatatcgagaagatgcaccggatttaatatttttcaccagaatcaaatcgatttcgtcatgcttcagaagggtaggtcagtgccatgccgacgcaccacatcaaacccatggcccgtcttcggtctgcttcggatccttacactgcgcaagtatttaataacggagcgcgacgtcgcaagccacacatccagccgcactcatgccaaaccgcctcgacatcagctcgcgaagccagtattcttatcttcccccagtcccgcttgggcggttattcagctagctggtcgtcgttgctagcgagtcgattcccgtgcgtgctgcttattcctcaatcaccaattcacctccaagcccaaagccccagcagcgccatgcgtcgaactcacttcactcctgtcacgcccacgcgccaattcagcgccgcaacgttcccctcactgccccaactcgagtcaaccaacctcccatcaagcaagatctcgcctccgcgactcgtaattctgggtccgccggctggaggcaagggaactcaatgcgaacttcttgtccaattgctcggagtcgtgcacctgtcgacgggtaacatcctccgccaagccattcacgaccagacgccgctaggtctcaaggctcagcagttcatggaccacggcgagctcgtgcccgacgacatcatcgtcgacgttgtcctcgcacgtctcgctgagtcggactgcgcgactaggggctggctgctggacggcttccctcgcactgccagacaagcggaagcgctgctgactgctcaaggtgggatggcagcccctgactgtgtcctggagctggaagtccccgacaaggaggtgatccgacgcatcgccggtcgacgagtggaccccgtgacggggaaaacttaccacgtcgagttcagcccgccgccggccgatgtggccgcccgcgtggtgcagcgcagcgatgacacggaggagaagatccagacgcggttgatgcagttccacgcgcacgcggacgccgtccgcaccgtgtttgagaactaccgaggcgaattcggagccacgatccaagtgatgcgggcgaatggctaccaacctcctccggccattgcgcagtcctttgcggacttcgccttgaagcacgcggcccagcgcagcctcggtctcatccgacgggacatctccaagcggctgcgtcggcggcttgagacgggaggccgcggcccgcaccaaatcccgaatccgcagcagaagccggcgtatccggtgcgagcgcgcgttcgagcgctgtacgctccgcttcgaacgccaccggctccgaagagcgagcaacgactcaaacccatgcgcggcatggtgcgcgaactgctgcgcagactcaaagctgctgtgtagtgggttttttggcgactcagggcttggatacttttttttgctattaccagcttccacggggttaactaacgttatcatagagcaatacacaccaacgcgacagacttggctgtttcgtcgccgaattcgtccagaggttggttgccttgggccttccagcctagcgcttgaaatcggcggtcatccttcgcgtcgcgttcgctgtgggaagtcgcactgagaccgcgcagtgctgcctcgactgccgccacgtggcagaagggtcctgaaaggggttcgtgagaaaagcgtagctagccacacgtgcggttgcgtacagaatgcgctgcttaatgccagcttcgaggtggtccgtaaacgcctcgataacgagcgctacgacttggtagcaccgaactgctccaaacatacaggcattgtatgtttggagcatgacgctggcatgtcctgccttgctcgtacagtgctgcattgcgttgcgcgctgcctggttgaagtgcctggtcgccgcgtctatgctgcacaaaaatcactctcgggagccaatcaggagcgcgctctactgcgaaagtgtgtagggtctccgaagtgaacgagattgagttcacatctcggtgagccccgcttactcgatcggcgctgcactgcgaacccgtactcggctttctagtggcttcgccttctcgtccaagctgagaccggggctggctgtgctggctgcaatcccgactggcagagtcctcaatatgaagtgggtgtggattgtcgacgtggaatcgaaagcgttgatcttgaacatcaggtcggaggagctcatcaacgacagaggggaaagcaccgaatctacctggccctggccgctgccagcgcgctacaggctgtagcctacagccgtccatgcctgcgtggatctagaacaactttgcccagtcatagccaggcgagccaaaaatcaaaccacccgcactggtgggcggcgtctcctcgcgctgctctgcttttcgccaaatgagccgatctacctgctcacatggcgcaaccctcaccagccagccgcgcggcaaacagagcgcgccccacacgtcgtctccgcgccccacgtccgcaggccccgactttcgcgcccccgaaaaaaccgaagccaattttcacgctcggaagccggaaaattccgcttcgattcgatgcgccttctccaagccgccgcatagccgcgcgccacgcaggactccgagtcaccaaagtctcactcagagatttgccccgacattgccaagagctccacagtcccaagccaccaccacttaacaatgacgtcgtctccgctcgacttccgccgccgctcgctgtccgagggctcccgcctcaacttcatcgtcgaggaggccgaggacgagcccgaggactttgctctgctctcgcccgagcagcccacggacgacctccacccgctgctgcaccacggcggggagagcttcgccgcgctggagcagcgctccaagtccgagagcttcatctgcacggcgcagggcgtcgtgttccaggacaccaagtgccagaggtaccagtccaagatcgacagcctcgtggcgctggccgccagctcctccagctcgcagagcaacgtgctgctggccaagaaggcgctcaggtatcgcaaagtgctcgagcgccgccgcaacgtggtctgaacttcactaccaaaagagcttcgcgtccgcgaccagaaggctgtctgtgcctttagacgctgcgtgggcagacggccaagaggctaagaaagacggagaactcgcggcgcttgagacccctgcagccctgcggctgcaagtgaagcagctgctgttatgtatcatcgatgtatgtagtctagtgatggaaaatagcctgtagctatgtatttaaacgccgagaaatcgcagcgaaaacccttatcatactgtatcaccttgtgcctactttgtccaataccgaagagtatacagtctagtcaccaaaagacgatccgtataagtctacgaatgaaattgtgctttaacctatttcgtagtgatgaaatgtctacatgtagtttggctctcgaaaaacgaggcgactattttttattcccattagataggggcggtaatcgagaataatgccttcttgtcgatactgattgccaacagctttgcagccacgcgcttatccgtctcttctttcatccaagaagcagtgtgagcgacgagtagtctcgtcagccgctctaaatcaagggaagaggtcagggccttccaaactttggaattcaaacgtgtccgaaagcaacgccaacgtgccgtaatcgtaccaggaaagcttcaattgatgtcctgcttccagttctgagcctgatctcgttgctaaccattccagtaccagcttcagccccgctagaagcatcaataaccaggctaaggcatcagggaccacccctacgcacgtaaatcagatgaatacacttcaaatagtgaacacgagaacttttcagggtcatgatcgcaggttacaacaacaaataatgctttatcgaagtcacagagcgaagatagaaaaagaaaatgacatgaacttcactttgcttcacttttaatccacgttggcccagccacgacgcgtgtgcgtaggcgccgtcaatgtgttcgccgaatagcaatgctgacagctaaggtttctttagccgaggtgtcagctttaaatgctgcgtgcgttaaagattctgcgctacgaagttctgcctcggattttttattttccttatctctaaacagcccgcgctatcatactgcaaacgcgtggtcaaaatcatgtgtcagtgcttcgtgattatccccgccgtcgctaagaacttcatcggtgtagtgagctttcagcgaacacatcatcaccggcaagagctcgtcttgattcttcgcttgccccttgtttaagtaagagacccagctgcggaattccggtctggtgaacatcatgtctcgttctcctccgcgacgcagttgtaagagcttaacgcgtcgtcagccgttttccccaatccgcgaactggacgctctgcaatcgtacagctcgtacttccgtgctagatacttccctcgctctagctagcactgttgccaggacatcgtctccatactcaactttcattgttgaatacatcgccatctctgccgcttcgcggtttttcttgaaagacttggtcacggttttctcccacttcaaaaagtttgtgttcgtgaaaatattgggaatgttcttgccaagcttgtggcgctgaaacagacgctcggcagccttttgcttgtcaggtgtcaacttgcagaggaacttcgctacggtgggattgtgccaatcccaaccactgtcaacgcccccatcgcatcacctgatgagatgagctcatgcacacgctcaaaccgcccttcctgccgggaagggcggttcccggcacctccgaatgtgctccggttgccgcagttcacaccgcatagtagaagtagatttttttttactgttttgcacggattcatactggtgttagccatatcgtgaacatgtacacggcatgcccaccacaacgaagggcacggcatctgcggagccaaagctttagatgtagtgtaccttggtatgcttacatgtattacatgtaacatactgtattattgtgccggagctccgaccgtcttccacttcaatccaatgtagccatatcttatggcaaaaagtaaccagtgtagccatctctctcaccgttcgtacttagtcgagtctcattccagccagccagcttattgtagcgtcaagatggaggcctgggtgcgcgacaaggtgtcgctgctggggctggacgcgtccgtgtacgtcgagtacgcgctgggtctgctgcaggatgaggacatggacgtgtcggagcgcgtggccagcgtcatcgccgtgttctcgggcgccgccgacggcctcgtggcccaagacgtgctggaccgcactctggacgaggcggccatgacgcaggacgtgtccacgctgctgcaggccgcgcagcagcagacgcagcagcagcaggagctggagctggcggagaagaagctcaaggacctgcagctgcgcgagaagcagcgccaggaggccgaggacgcggccgctagagagaagcagagggcggccgagcgcctcaagaacatgacgcgcgagcagatcgcggcccgcgagcagctcatcagcgagtacggcttcacggtcatgtccgagttcgacgaggagggcaacgtggtgaagatcaaggacaaggagaagagctcctcggccgaggacgccggccccgccaactcgaaccgccagcgcgtgcagcaggcgcagaacgccatgcgcgagaagatgaagaaggagcacgagaagaaggtcaagtacgagaaggagctgctggccaaggacaaggcccgcaaggacaaggccaagaagaggacgatgaagagggagaagcagcgcggctgcggctagagggtatggttcactctaaactgttctaataggatatcgctgcagcgtcaagattgttggaagatggaggagaggtgtctttagctgcaggcgcgtcggcgctccatcatcttgttgcggtatcgcagagccttctgggcgagcagcgcgttgctcttggagctgttggggttggctgcaagggccatgagattcctcagcctggtctggtactgctggcttttcgtgtcctggaagacgatcccctgtgccgtgcagatgaagctctcggacttggaacgcgtttcctgagtgttgttatggtggcgcgtgagctggaattggtgctcctccggttcgttttggggctgcgaggctgagcgctcctgctcttcctcggtaattgtggtcaagaggtggatgttgcaaccttcagagagcgagcgccgccttgaaacgcgcgcgcatgcctctgcggcggagcgtgacgaatcgctgtgggtcatacttgtggagtgtcgaggccaatgcaaaagctgcaatgggataatggttcgtcggcagacagcgctattcatgccacaccagcagcgttgcggatcgctacacgcatcattgtcggcgtggttgagcaagtccggataggaccgctctaagcgtttcttggaagatttttttaaccacaccggtcgcattaaaccattgatgagtctccaggttggctttacaacaaggcgctgcccatgagagcgtgcacgtacaaatgcctttggttgcgcatcgttgcatgtctgaataacggtctctgatcaacggccaagctctgggctggaaacgcggcgtcgtcttcatcgttggccgatccctacctaaaagtggacggtccgctcgaggaagcagcaggtaccgtgagtgaataaggcctcagctcttcggggttttgtggaatactgcttggtcgaactcaagctaaaacttcaaggggctgtgaacctgcgcgagagtttttgcttgcaatggggcgagggctgccctctgctttatctactacttgaacatattttgccggaattgcttacgcatccgaattgagtagtctcggcgcccgcaactggaaagtgttttgtccaggtggcacgtcagtctcatgccatctcgttgtccgctggccccaactcggcatctcgaatgccatcactgctagcgaacagcctaagtttgctcgaacttagtgtccagtagggctgcagaacgagacggtaactgcagcgcaacgatgagctcccactcatccaagatggcaatggacatttctggagtcacggccaccggtgtcggaagaactcttggttgtgtgcatgacgtgccctcaaaatgacgagcctctcgcccctgacgagtcttatgacggaaacaattgcttgcgacctacacaattccactccactcatccgcgatggcagtgaacgtttctactatgctgtgcttcataatgacgagcctcgctgcgtgacggaagttcaattgcaagccgcattcaagtagctagcagtgccagcgagcaatttgatttccactcatcgggtgtgggcccatggaccacgatgatgtgtcctggagctgctgcaccgcgttccgttggtttgcttgattcctacgggattcaagccgagatggcaacgctcccgacgttgttctccaagtgctttgccgtctctacggccgattgtcgatgcacaaatgcaatatcgctgcgatttcttggcggggatttaaatatatagctacaggctattccactactttcgggggccaacacacatcccgcgactcgggtgcgccccaccgctacaccctttcacagtgcgggcttccttgagtacaaatatcgctcccagcagcagtggctgcttcatctgcagccaccagggcgggagcggagcctacagcgtcgcgaaacggggtgaccctcctgacttttccagggccgtcaaggcgacgcagcgtctaattttgcgccgacggcctcctggcaacgcgagccttttcacggatttctcccagtcactcgatgatgcggcggcgctccatgaccttgcggtagcgcagcgccttcttggccagcagcacgttgctctgcgagctggaggagctggcggccagcgccacaaggctgtcgatcttggactggtacctctggcacttggtgtcctcgaacacgatgccctgcgccgtgcagatgaagctctcggacttggagcggtgctcgagcgccagcagcggctcgtcgtcgtggcacgcggccagcacgagcgggtgatggtcgtccacgggctcgtcgggcatgggcagcgccgcgggctcctccacgtcctcggccagcgacgccaggtagctgagcttgcagctcccggacagcgagtggcggcgcgcgtccagcgacagcgacaacgagagcgacgtcatggctacggatgcggtaacttgatcaacgcgcggcgaatctcagaatgccggcaatgggagactttcgatgggccgccagacccaagcaaacagccgccgtggtcgacggaattttctcggccgcgactcatcccagtgtgatttttggggcggacactggacctcggacccggacattcgtgtttgctgcgttctgtttggaggcggggcaccgctggacaacctacctactgtggagaatgcaggtgtgttcatgtagagctctctggtgcgtcttttgaagcttgtttcatgtggtcgtagctggcggatcgtccgtccgtcagtccgtcagttctgacgctgaagctcgcaacattggtgcggagtggcgctggtagcggtaagcgtaggtggggacgaacgtgttgtatgaatggacgaagctctagcgtgggcattccagcggggtggcgcaggtactgtgtggcctgtaaggccatcgcctttcgactcgaaaaagcgggtgcgccaggcaacttcaacgtcgtcgggccctacaagatcaccgacacattccagctttctcattggccaataagttcgtactagccgctttcggtgccgcggattggccaatacgagaagcgaaaatcttccttagggggcgttttatttccgctggcgcgtgagctttgtgcttgcgatcttctgcatagccgcgcgcctccacttcaactttagtcaaaagcagctcgcagacaaggcgaaggacaaccgctgcatctggagaccgagcgtgttggagctgcctcgcacatttggctttcgactgggggtctgcatctattgcttgcgtaactgtgctgatacagtgcgtcgtacagcggaaagtcgctttggatactttgcaagccctcggtggtgtgagcttgcgtgctacgcaggccaagtcaagactgccaagttatcctatcttggcggatactgtggctggcttccttcattgcatgcatgcagatttcttctatgagcgcaggtttgcggaccaggatggcgatccacgagggtgacgtctatggagctcgggaatcacgacgaggggaagcacgaccgccgtgtacgtgccctgattcaaagggccgacaaacacagctggaccgcgccaccgaaatccacggcgcgcgtcacaggaaacggatgctaacggacggatgacctattgagagcaagcccagtcgatacccgagacctcgagaccatgggcgcgctgcgccgaccgacagagagctccaaggcggcggtggcgaccaccaccaagtccttgtcggctgtgtcgctcaccaagaagacggtgcgttctgaatggaatcggtacttgcgtcttgggatgctcacctctgtctggtgctgcgcagaatgcgttggtttcggatgttgaagagctcaagaacaacctcgaggtaaggaggtggtgtggtactgtagttcccgtgcgtggtgtgggctaggtcttgcagctgagcgcttgattccagatccaaagccgagaggtgacccaacgagatgagaccttgcaggaactcgttggcaaggtggcttacgatagacgtagacctcatcttctgttcctcatattaactcaagatggggcactttgtttacaggtcgacatgctgcacgacgccttcaactccctgtctgatgtcttcacgtgtgaagttggtaagttgttgcgacgtgttactacggacaatgacttgacctcgcgccgtctgacacttaaaagaggagttgcagaagcagtttgttgctacgacatctcagctacaagaccgagtggccaagttggaaggctcgatcagactgctagagtcacaggtgccacgaatggatggaaagcgtcggcagctgcaggaaacatcagagcgacgcttcctcaacgttcaagagacgtgttccaagctcgagttggccttgtacgagtctcaagccgagctagcgctcctgaaaaactcgtccgaagacctcatgacacgcgaacgcgaggctgcacatttgcaaaagtcgctgcaaatatcccaggaagatgccacagaagctctaaaacggctgaaggaagagaacagtcagctccaagtcgagctgtttgcgcttaaagaacagacgaatggagccacgactactgtcgcaagcgacgtgcaggtgttggcaaaagaatactcggcgcttcgtagtgcagtctctaagcaacagtcccagtggctggggaagctcaatgctctgcaagaagctatcgatcgacaggggaaaatggacaaaactcaacttactcaacgcgtagacgcgctctccgacgctgtagcatcccaagagcatcgcacgaaagacgccgtcgacaacctactgaaaaaccacgctcgaattcgttgcgcggtcgacgagggcatgacgatctgttcccgagagatccgagctctgagcaacgaagtcaaagctgtgcaagtagaccaacaagagaaactcgaccaggcggttcagcaaatggcaacgaattccattgaatgcggccaacggcacggcgagctgcacctctcgcttcgctccatagctcaccgactcaaagtctcgctttagtgtacgcttcacaatgccgcagatccactgcaatatacgctggcagaaaaatagagattctaccactggtagatccttcatactttagttctgtcttcttcaaacgtagaaagctccagccggcttccccgtcatgggaacagcttcgggtgccacatatttctgcctatacttgtccttcagcgaagcgtacttgctcgagatatcctggaaagaaaaaaacaagtgagcgtttacgacgcatatacagtagataaaatcactttgcccccaccttttccttcttgacggtcagaagctcatcatccaaatctcggagtgcactcagttgtcggtagtgatacttccggtggcgccgagcgcgatgcagctcactactgcagcagaacctcagcacctccatcacgaacagcgtcaacagtccatacgccgggatgaacttgtcttcctcaagacgacgcagctgatcgtctctggcattataaaataaaaacaaataagtaagattcccgcgacataaaataaaatataaaatgtgttcacgtacgtgatcttgagttcttgttgatgttgacgcaggaatcggtcaattgtggctccttgcgtgaagatcaccaccgctagtgccagctctgccagcgccaggagaatcagcagcgacgaggacagcgagaggcacacggagcagctgcggttagacgccccgcaccagctcatgagtaccgagaggatcagtagaccccccaccgccaggattggcgcgtagagccattccggggcgtagtggttgagtcctgtgttaatttatttaataaaaccaataagcttttgtaatattacggagtattgtacggaccgaggtagaggctgtagacggtgagcgcgatgccgcatacgaggtcgacgccgttgaagacgaagagcgcgctgccggagcagcactcgctgcaggagtcgccgcacattgttctcaatggattttcctatgggagttactatggggcggtaaattgtcaatcgcattgaagatcaagatgggtacatttcagcgtcaactcatttgtgcccatttgctcttcaactgtcgaaaaggtagccaagcctcagtagtattgaataaatacagctcaagttgaagtgcttgctcaggcgaactcatttacgcagcggcagaggtgctgggatccggttgccaatgctttgaaggagggcacttgaagattccggtgaggggctctcgcttgtcgacaagcagcgtatagagttcaacagcttgcagtttcgaggcgcgcgattgatcatgccccaaagccacgacatgggttcttgtccctgggatctatccgccctaaaccgcgtggagtagatagcatagctcgacgcatatgtttgttcatcaacatgcagcttctttacttaaaatactttacttccagtctaaggtttataaggggggggcggagggaggtgagaccatggacgtgtgtaagttgggtctctaggttcggtctatcgggacggggcagctctgcgcgcgggaggccagctcggggatccgcaggtcgttggccgcgccgttcggtcgccgcgagcgcatctcgcggtacttgagcgccgtcttggcgatgagcgcgttgcgctccgagctctcggggctgagcgcggtctcaatgagacgctcggccttggcgatcgtctggcgctgaaactcctcgtcctggaagacgatgccgtccgacgtccgcacgtagaacgccgagcagcgcgcgaatgtgatggtcctgtccggcagtgaggcgggctgcgactgcagcgtctgtgcggccttggtggccccctcggagtgtgagcgccagcttgggggcatgcacacgtcctgcacactggagccgaccatcgtcgatatattgcgttggaggctgtcttcttcgccggccggcaaatccggtaatgaccctccggcgctggcgctggacgctcagcggcggcgtgcgttactccgagcctaggcgaaaggctgtggaattttcctgcgagtcaacacgggtgtttcgtccacgaagccaggatgtccattggatttcccccttccttcacgctcgactcgtagtcgtaggtatgcactgatgggcggatagtgctgctctggcgccaagaagacgtcgaggccggaaacgcacccaccactaacgccgggtctagtcaagtggtcgagcacaaggcatgagacgactcgcagtggcgccagcggtggccagtgccgcgcatgggacggctacccgcaaagctagcggcgccaggtacgtaccaacagagggggcgtgtgatttcttccacaatccacgcgcgcaagatgattttggtctggagctgataccttcggtgccggagccgccagcgagctggagtcaactcgtgagtatgctttttcggaacattaagccgtcccacgcagcgtgtcgatgttgaccacccacagatgttgagtcgatcgattcagctcgctcctggctgctggatcgccgcccgctgcgtttagtacagctcgctacaaatagaaggagagatcgtcatgcggagaaggcagccgagcaaatccttcgtcatgggctcgagctggccgcatgataaacggggtatcggttctcggcgctcgcaaaggcaggcaggcgagactccgtaagaaggcaggtctgaccattgagccccagcgaagcttccgagagcggcagttatggacgagaagtgttcaaaacatcgagcactgttgtgcacgggatagcagtgggcagtgggctgcgtatcatcgaggggtgcagcatctatctcatcaaacccgagcgaactcgacaggaaaccttaccccctgcctggctgtaggatacagtaccaaccagtcgcagactgcgactcgcagcgatctttgttcacactttcgcggtgactgttagcgcatgagaagtatgccgagccatttctcgcagcagcgcgtgcaacccagcgaagttaatttgaggcttccacctccacggccactctcggtaccgcgtgcatcaactagtggagttggtattaatcatgttgaaaggcgtctgacggccatgtcaactgctactgcgctgcaattacatgagtggttcagttggcgttgcttcgtggggacgatgtgtttgggggccgcctgggtagcaacgctctaacgctttagcctatcagtcccatatctcctgagatctcctgagctctctacacccagatcctagcgacaatattcgcgccagcggtagctcaatgcagttctcaacgttttcatgatcgctattatctttactcttcgcccagccatgatctcggtttccttctcatggctcgtacactttggtcgcgattggcgttgggtctgcgctgcacactggcaaggagcccttgcgtcgcctgctgtctaccgttacagtgctgtaatttgctagaagatatagaagatattggagacgcaactgtctcggaacaggcaaaactaacctggtgcaaaggacaccacaactccaactgaagcgcgtggctgaatggggtaagctcagtatacgtttaaacttagtaagcaacagaatagtggaggaaagcctcacgtagctcgctaatctctcccactgcaggtagccaacatgattgtctgtagataggagggtttgctgtgaagctgcatgttccttggaaagatcggagcagatgggctaagagcaagctagacacttgatcggaaattctacttacgcggtactacgtatcatgagagcatggattatactgctcccagaaatccaagcatccaaggaggtccgtgggaggccaatcgagcctcattctcgattcttggactataatactcgagcattgaattgcgtgatggaaactccgcctgctcgatagccccaaagaagaaacggtatgaattgattcacagacccacctaccaagaggaagcaagggctgcgcgagctcgaaaatatatttttcaatgagcacgcgccatggcaaaaaaaatataacatcgcgtttcaacatgtagcgattttcgggtcgccacagctcacggcgagtcttcaaggtcccattgcaggccactgacctaccacgcgcactcgttgaatcagctctcagctcactccagctctaatggtttttttacgatgatgcatcgcctacccagcaacctgcaactagctgcccgcaacgagcaacctgaaaccaatcccagcagcgtccgttgtgcaacggaccgacaggcacatccgagctccctctgtaagcctaggtaacagccgtagctcgagagcttccttcattcacttcattcaatctcagccttcattttcctgttcaacctcaagtcctcttcccaagactccgttcgtctacagaacacgtgacaatttcgaaattagcagtgaaaactctgtacgaccgtattttgaggcactaccgtgtacacccgactaagtgcgactacattgcatgcaaagacccaagactccccgtgctgctgaagagacatcgccgaacctgcgaccgcgccagcaaccaaggattgacgacaacgacatggatcagtctccggcgccagggcagcctgcttctaccccctctcgcacgccggcaccgcaaggaccgggtgcaccatcttcaacgtcgccaccccctcaattccccggtgcggctatgccacaacccggggcgggcactagtgacgctgttcttggccagctcctgcacatgatggttgtgcagcaacaggccatgcagctgcagcagcagcaattccaatcgttcatggagcaacagagcaactttcagcgcgagatgtttgagcagcagtctcgtgctactcactccaaagttctaagggcgtgccggcgaggacctagagctatggctcttcgctattgaagagcacctaagcagctttgctgtcgagcgcgacagctgcgactcgcgattcgtcgacatggtcgtcccgttcttgggaccggatgctatgtcctggtaccggaagttcaagaacatcctcggcgaccagcctcggacatggttcctattcaaacagcagatccgtgttcgcttccgcgaaagcgatttcgagttcaagctactctctaaattgcacgacctccaggtgacaggctcgcagcatgaatatacttcgaagttcatgctactgctctcccaatcatcgctggagctgcctgaaatggtcaagcgctggctgtaccagcaaaatctgcggccggaaacctcgagtcacatctctcagaacatcccgtttacgctgcaagaaaccatcgatcacgcgcagcgctttgaacgcgcgcaagccctccaagttccgccaaaaccaaaaccagattcagaatcagaagggttcggggtcaacttcaacttcggcttcaacccgaccggctgccggctcgactaagcccaactcccggaagagcaaacccgcctcgggggctaatcagcctaaagcgactggttttgtacctacatgccacaactgcggtgaggtgggtcacatcgcccctgcctgccccgatcggcagtaaggtggcggtggcaagcagaaaaactaggtgactcggtgggctggcgccccaccgagtctgacgctgcagccgttcgccattcgattgcaagccgtcaatccaggggtcggtctcctatcacctcacagagcttcaattatggcactgatgaagcggtatgcagatcgagccccaacaaaatgtatggctacctagagcagcatggtcatcttggcaaccatgctgcttctgcatttatcgacagtggtgcttcgttcaacgcggtatcaccacgaatcgttgagtctctgcagttgccggttcgagactactctaaacccctgataattcgcttgggaagcggctcgaccacggtcattccaagacgagtcgtcaatctcaagtttgctttggacggatttgctctttaccgctccaaggcgtttgtattggatattcctggaggaaaggatattctcctcggtatgccgtggctagttgacaccaaccccgatattgactggaagctcaagactgtccggccgcgcgaccaattatctgcatttgcttttcacccctgcgttccggtcccaccggctcgacgcatcgcgggacatcgccgcggcgtccgccaaaaagacatatcagacgacgacgcgctcctcaactactactatctgcatgggcatcactcgtccgtcggagctacgaggctagttcgtcctcgacaccttcgtcgtctccttcgtgagtgcgacaacgagttctgcttcttcgtgaatcccagtgacgagcccagcaaggcggaccaggcgtgggaaaatctaaaaacctctcctgcttagccagcatctcagtagtccacgcgcgaatggcctcgcgctgctcagcagaaaccggaaattgcttgcggtgaataggaacgtcgtctgtcagctcgatcttggcgtccatgccagcctggcgagtggggtagatgactgcgaaatactttatcacgaaatttgcatgtcagcggaggccaagatgatccgaccctccagttcgccgtactgcgcctcaaccttctgcgtcaagaagaagaatggagaatggcgaatagttcacgactttcggggcctgaacacaaaaatccgtgtgcctgctaacccaatcccacgcaaagacgatattctgcgtgccatgtccaagggcaagttgttttccgccatggacttgctgtggggatttttccaagtgaagctggtcgaagaatctatacctttcacagcattcgctacccctgacggctcattcgagtacttggttacgccgatgggtatttcaagcagcccgtcgtcctttaaccgcctcgttcaagcggtgttctcggatctccagtcctactgtcaaacctacttcgacggcctgttcgtgtttacatgctccgactcgatcgacgaccacctcgctgccctggaaaaggtgttagcaatgtgcgctgagcagaatctctacatcaaaatcgagtagtgcacattttgtgctactgagatcccatgcctcggtgatatcgtcggctaggatggcgtccggatggaccccagcaagagtcaatcgataaaagactgaccaacttctcgcacgaagccggaactgcagtcctttcttggcacctgcgtgtatgtgatgaagttctgcgagggtttcggtgacctgatagctccgctcaccgaactgacgaaaggcaagagccgtcgtgatccaatcacctgatcgagcagcaggcattcgaggagctgaagcgtaagctagcttcccctcccgtcctcgcacacccagactttgcgaagccatttcacgtcagcatggatgcttctgactttgcaatcgggggataccttttccagcacgatgattccggccgcgagcagatcatcgcgttcaatggacgcaagctttcaaaagcggaactcatctaccccacccgcgaaaaggaattgttagctgcgctacacgcgatgcgagtttggaaagtctatctgatcgaccgaccattcttcataaataccgaccaccgcactattgagggcattttacagcagcagacgtgctctcaacgactcgctcgctagctgaacgagcttgcactctttcaaccccagttcaagtgggttccgggtgctacaaacgtggtggccgcacgatctcacgcaatccgagctggaacgacggcaccagccgagccgttagcctttcggccctgttgaaatcgctcacgcgtcaagaacctgcagatgaagaagcactctttgctcactcaacttcaacagcagtcgacatctcggcggaatgcagtcgtctttattcttccgacaaatactttgggccaatatgaagcttgctcacgtccgacgcaactcgcccgcgcaaataccagcgcttcgagctctcagaagggctgatactcttccggattcggcctggtgctcctgctcgagtgtgtgttccggcagacgccgcgctaagaaataccatcatgcacgaggagcacgatacgccgactcgtgggcatccggggcaggcaaagacacagctactcgtggcgtcgaaatactactggcctggtatggtgaagtccatccgctcgtacgtcgaaacttgcgagctttgccagcggaacaagtacattcgcggcaaacccactaacataacgaaggccaacctggtggacatggagcgcagaggcatcatcgacgagctcctcaagctaagtgacaatggagttctaccccgaggagccttcgcccgcgtcggggcccatgtgaagcgtgacccgacccccgtgagcgctatttggaagcgctacacggctgcggtggcggctggtgttcctggtggcgagtgggctagccggatcaagcagagcagcggcaggaagcgtaagaatcgagatgaaggcggacgaagctggcgagtgttcctgtggaggataggacagttgagaggcgcgttgcggctgcttcagggctctcccggcacctagtacgacaagctgtgaaggaaggcatggtacggcgtcgtacgacgtttatcaagccggcgctgacccgctggaccgtgtcgaacatgcgctgtcgttcatcgacgacaagacgttacgcttcgagtcgatgcacaacgtggtccacgtcgatgagaagtggttctacgcagaccgcaacagacgttcctaccttgtatttgacggtgaagagatgcctccacgagcctggaagagcaagcgcttcatacccaagaccatgttcctggcagcactcgcacgccctcggtaagtctctatatttttataattttatactgtggataacctttgacactgtgtatgaaatttctgtgtaggtacgatccacaccgtaagcagagatgggatggcaaggtggggctcatgtctttcacggagaagtataaggcacagcgtaaaagcaagaatagagccaagggggaaatttgcacacgcaatcttgataccgtcgatcgaaatgtctacaaggactatctgatcaccaaggtgttcccagctatcaagtcgaagtggccaaggaaggaccgtcgccagttcatcttcgtgcaacaagataatgcgaagccgcacgtgtcgccaaccgatccggacgttgtcgcagcgggcacagaaggagggtggaacatcaggctgttatgccaagcagccaactcacccgagctcaattgccttgacttgggagtttttgcttcaatgcagagcattcaacactgtctaccaaggaagggcatcgatgcgcttatagcgtcggttgaggacgcattcgggagctcaaacccgacactgtggacaacatctttcttacgctacaggcgtgcatgcgggcaatcttggaggaggctggcggcaatctctacaagcttccacacttggggaaggccaaactccgacgtgcgaatgagctaccggtaagtctatcgtgcagtagagagctgtatgacgccgcacttgcgttactccaatcttcaaaccgtggtagtgcactattctttaaatgaaaagtacttcgaagtagatacctttctccttctttgaactcaaagtacactttataaattagtatttgtcgtgtataagattcggccgtcccagaaaaactgccgacctatcataatgacttccggtgatcatactttctgtgctatttggtgcagttttggggatattcaatatatccagagtaaacaaatcagcggctgctatcgcgcagctgcgtaagataaacttacctttggactggctggtaagacaaattcgtttttagaaaaaaaatcagtggcctcctgtcgccagtccaaaatcctccctcctcccccgcaagccgcaagcgatcaggtcctgaccccgtggcatagtgcgtacgcgtgagttagttcatgtattccctgcttaaggctaacctgtacgtatccatactctatgtcaggccccggaggacgacatagctgccgatggagctcgcgatgtgcatccagaagctcctctcgagatggtcactgtgaatgcaacacccagccaagcaagctcagcccaagctcctcccaccaccgatccgccctcactcacgccaccagaagaagcagaagcagagcggatacggcttggggcgaagaagcgacagcagcaagaaaacgcagtgccgaagtctagacgctcccccctacgctgccaagctgacgaggatcggctccgaaacgctgaagcggaccgggcatacagtcaatcccgtgccgaccaagctgagcgttgggagtcccgcctggccagtcatctggcagctgacaacgacggtgaaagtgaaggtgaagcagcgctagcggatgtattggcgcagcttgaggaagaggatgaagatgagtatccggacaacagtggcgattcggactacaacgacgatcgacaaacacctgagggcgatgacgatggagcctcttgtgacggtattggacgcgctagcgacatcgatttcgctgcgaatagtgtgccgacaccgaagaagtaccaaaacccaaagtggcatcaaacactgaaggcgcactaaacaccgaagaagcaccaaaacccgaaagcgaaccaaaagcctgtctagtgcgaggacgaagaatcggaaagtcaaggtggagtggaagatgtaccagtcgtcggtggctacttggaaggatttcctatgtactggtcgtcgtggaaaagtttctacgaagcgttcgacgagttccaagaggctacgtaccagcgcttcccgtcccgcacaagtacttcaattaagtccaggaacaagcaaattgctgccgcgcagaaagaggtcaaaaagaaacaaagtaagccgaagtcgagaaaggttcgcgcccaccgacagagcacaggtaacacactattgccagagtcatgggagaaatacagcaggacgttcgtgtgcactcatggtattccgtacgaaagtcgtggagaaggcttgcggcagcatgacgccgtccgttttgtggcgtgtactgctcgtgtcaacgcacgggtttgttgtcgaccgagtggcgttggatttcatatcgttgtgaatgcaacgggaacgcacagccattctctcaccgagcatcagtggtataactatgctgagaacagacgcgtcttggatccggagctacaccgcgatgtggcagtcatgagcaaggcgggggccaagccacgagggatattagggttatcttcgagccaaaacaggttggtggttttggtgtgtattctgtatattgcacgaaacactaacaaaatttggtatggtgttctataaaggcaagcgaacgattctacgagacgtgcataacatgatccaggacgctaagaagtgctttaacggaggccgatcggatgcggagcgcgctgtctccgtgctggacgaattctgtgagatgaacactggaaatgtggcggagttcgtcattgacaaggagaccaacgtggtgcaagtgataacgttccagtcagcgcggcagaagcgtctctttgcagccttccccgaggttgttctggtcgactcgactcataacagcaacgcgaaccgttacaagctgtttagcttcgcagttcacaacatcttcggccgggtgggtaaatgctttcaggccctaaccaaaaatgtactgaacatttgtataattttctgtgtggtttattttcttagggtcaattcgtgcaacatgcatggctgtgaattcctggattttcgagagaagctctggctgcactcggggtctatcatcggtggccttttggcactccaatccgagtatttggatgttgccattgtcaactcgtttttacggctttgatgatgctgatcagaagatgcgcacagcaaaaggatatggcgctgcgaatgccagggtcaagttcgtcatcagcgtgattaacttggggaaccgctggggtgcatttttcgtgaataaggagacgaagatctgctacctgtttgaccccatgcaactgactagcaatttgtccgcgctgaaggaagcagttctcaccgtggttgagaagatgctggacatgaccgatcaactggactaccacgtcattgcccactgccagcagagggatggtacgtcgtgtggcatttggtgcttggtggtgttggaactactactgtttggtgcaactcctgaaacctggtctgactactggaaggactctctgtacgaagtggtaggctacttgaggttgtgctacctacggaaggtgattagcttgcagcttcagcagccccagcaggtttagtaggcaccctaacttcaatacatatctttggtacttgatttttgtgccagaccaaaataccaaagtcataccgaaactaaggaacttaaaggacttcgagttttttgttggcgttgaaagtagacgctactccaattttttgaatattaatgtaccgcatttcgcatgttgagaaacacacccataccaagtacttagggttattttcacaccttacccaaaattgatgtaaaaccaaaaaaaatgggacaggtgactatttttgaagttagacgactgcttcctctacaatgtcgtctagcaagaagtcatggctcaactcaacaggatcgccctctacacctttgccaatccaagttggcagcagtgtaaggcaaaacggggtgtcccgtaattagatttttaatttttcaaaaacatatttttcaaaaattactgtaactcaatgcggatttagtccagagcaaaccacgcaggattcttcgctgtgggtatctacatagtacagtgcagcaacggcgatggagagcgcggctgggaatcttcgttccatcaaggagatcatgggtaaatccaatgaagcgaagctgcaattcgcatggtacaggtcgattgtggcttgagcacggcatgggccgtcttgactgcagagttcttccacatcctccgccttcctcctctttctcccctcctcgcctttgatccttctcgccccatccccatctgcgcgtcgctgtggccacgtcgcctgccgtatttccctctgtcacgcagcgtgtgtccaatctctagggccgcgactcaccctcagcttaaaatgaccgcgcagtccgtctctctcgccgcgctagagaccgccgtcgctcttcattgtcttggggacgcacgccgccatcatctgctgagatgtgtgtcgctacaggtcgttcagagatccagccagcccctctcacggtgaagctgctcgctcggtactgtcgtgcggcccgggcgggtggctgtctcgacagtaggcgcatcctgtcctgggtggtattggaggctagtggcgcacgggatgtccttcacgattccatcaggcgactacctgtagcagccgtgctgcgggcgctggcagcaagcagactgcgacttgagaccgtcgctttttggagtttgctctccactaaatccacattgctctaaatactaatttcagaaaatattttccgatttttggatcttacttaagttacttcacaccgttttacactgctgccaacttggattggcaaaggtgtagtagatgcagctcctctagatcggcgatcaactctgcgcaggcaatgcagttatcgctcggtagcaatccgctcgcgcaaaaaccattggatattgtctcagaggagagctcgccccacgctttcagcacccagttgcaaaaccgagtacttcagcctcctcggctacatctagagccttatcctgcagcatcttggtagaatctcgcagctcgtttacccattgagccaagtaggcctcgctctcagccgacaacacggttgccgtaccgacgctgcgcactttcttgtgggtgcccttgccttcagccgcagcggcgttaagacgcttgatctcccgagcccaccgcagaatcgtagtgcgcttgctgttgtaggatctgctactaaggttaggataatagtgcttgatagtcgtcttgatagccttacactgcttgtaatgagcgacaactgcgagctttttctcgacagtttcccctgtcagctggtactgctgtacatgacggccgatcccgccaagattcggtcttccttgcgggcgcttgtgcgccattgtcaaactggtgctccggcgttgctcaaaaaaatgtgtaaagtacccaatatagggtgtatcgctctacgtgcgatctaacacacattttttaaggacggtgattggtcaaaataaaggtgtatcgcttaagtcgctgtggcgctctacatgcgaaatgcggtaccttgtattttccaatactataattaagtgctcctataggtacttatctgtcacagatgttgctgtgaaagagaccattgactacgatgaatgaccactataacctatgctgatacaacgcacaggaatacgtaaattactggatccccgtaatatattcttgtagactagtttttgtgtcctgcaaagacaagcctcgcatccattatttgaagctatcattgggacgaagtcccattataatgacttggtaccggtatacctctccttaccgtagtgtctggtgattgattagatgaaataagtaggtttagggttgcaatgtatagcagggggcggagccctcgacctccccgaattttactcgggtatagtgggcttttgggcccctcggacgaggggccaagagactcctcacagactttcagtaagggcaccgtcatcggagggccttaaagtaatggtacataagtgcacggcgccccttcgatcacggcggtatgaggtcgtcggatcgctcttgggactctgtcgtggcgatcttgacccatgagagtgttgcctcagcgaagggcttgtgttcggcgctgcaagatttagatgcgatgacgaattgttgcattgctggcactgctttttgatgcagggtaggagctgctggcaattttgatgccgcgcaggaaggcgtgctgggcgatgtcagacatgctacatctccgaagctcgatagctaggttgagtgcacggctatcagctcatcactcttggtgcaacgggcacatagcaaccatccgaaagcacaacgctgtgttggagcttatttgctcacgaatgaccagcattcgtgccgactcgagctaggttcgcaaaaacttgcagcattcgtgctgactcgagctaggcttgcaaaaacttgcaacaaagcgcagcctcggtcaggttggttcccttgctacctgtgcatgcagttttaattaagagcaacacagctggcaggaggtgttttgatgcataactgtgctagcaataccggactgcgatcaagtaaggcagctattctgtcccccagcaggtactgaaaaccatcgcagtagtttctgtagctggttcgatgcccatgactagtatagatagctagaactatttactatctatatggtaaaggtactaaatacatttgactgcacagcagaagcttacagcaaggcaggggtctaaagcctaggcttacacttcaaaaattgactagtagcgctgataagcttaggctgatgctttgggggcgtcgtcaaatgtacagttttactgtacgtaagaggtcggcccactagcaactcgactcgagctactcagctagtttaataacactttctgtagcagcaacacgatccaatcggtagcttctcgcggtccgacccgttatacactgcctcgcaaatcatggttgtactgtactgtgcggcctaaacctggtgctatcaccagcacgtcgtcgaacgaattgatattttacgaaaagccttgcgataccagatcatgcgcttcgagggggatgcaaacaggcggctcggaggtgtttggtggcggattggaatgtaaggcttcgttcttcagcaatagaccgatgcaaacatagcgggcacattgctacagcgttatcatcactgaactcggcaccctctgagattccacgccaccctttcgctctaactggttttgggtttgaaggcggttggcttgccttccttcagttcctgaagcctgaaaacaacaacaagacccgcctatatccaacaaatagtcaccagaagcacaagtgtgagcaattctgtaaagtagaacgcattctgcccgcgacgcgcaccgtacccggtcgaggatcgtcttcgtgaccttcccgttctcatcaatgggcggcaagcgcataacctcttggccatcctgaaacaggatcatgctcggaagctgccacgacgacgtcgacacgttgattcggttctccaccgccagatctgaccacttgtttacatcgaccctgccaaactgcaacgtgctcgacgagtatctgccccatagcattccggtgccgaggcaagtgacgccatcaatacccaatcctgcactcaaaaagcgccagctcaaatatatatcatttcctcgtacctgagcgatagatccgcgagcatcggctcaagctccacgcaagagtcactccagtcagtgtagtagaaaaccagccacgagttcggcgggcccttcttcttcgagccagcagctttcttgaccaatttttccaccatcgccgggtccaactcggtgatcttggacggaccatcatatcgaggctgccccacggccgagaacagcgctgcagcacacaacaaatgattctatgttagtaaagcggaacagttattgtacagtaattgttcccaaaaataattaccaaggcacaccagcgcgtaccacccgaaaagggtaatgtccaagtagtacagcgacgccagcaccgccagcttgccatacatgaagaagagcgcgacgactccatctgccgtcgccttcttgcggtagttgagcagccaggaacccaatgccagcaggaaaatctcttgttcctgtcgcaataatacaatacaataattgttattgtcaactccccactattactgaaaatcaataattgttttcaccagtggcaagttgaggaagttttcgcgctcggcgagggtctcgctagaccgctggaagcggatcggcgcgtacatgagcagcgccaccgcgttgcacacgtagtacggggccaagaaccgcgtccacatgcgcggatgcacagtctcgctcgcgggggtcgcgcttggcgccatgctcaagatacaataccagtgatagtgacgggtagcggaacgggcactaaagcactaaagctaaagatacagactgccgacaagatatctgcgacgtgtgagaaaaagtaatgagcaacgaatgctacggacaccacgaacacgaacacgaagcaatatactgaagcacaaccaacatccatcctatggagaaatgggcgacaagaaccgggttgctgctgcggcagagttgagcgcatttggcgtaagcgtgctgcgagtggcttcgaaatagaacgctatatctggattgtgatgccgtttgcggggcgtcatttccagttcatctagccaaccaccgcatcacttggtccctacgcgcagaggaaggatcgtaggagaaccatggagctcgcagtgcgtggctgcaacggcgcggacgaagcggcggtggagttgctgtcggcgccagactcgagcacgcgccgcaagctcttcgggctcactcacgccggcgcgttgatcgagacgtcgcaagtcacgctttgcgcggagctaccagcaccaaaagacccaactgccaccgaagaaccggcaaccgcagctcatgcaacgctcgcgggtttcgcgtcgttcgacgaccagatcccggcggcgcttgcgcgctggtccgaggttcgcgactacctcaagaagcgcctgctgttcggcaagcccaatggctgtttgatgctcatggcgttccgctacgaccccgaggtcagcacggagcgtaaggtgctggcggcgctgctgcaccaattgtttaagcttcaacaggacctgggtggggtggtcttggcagtgcatgttggcgtggacgtcgaggagctcggagtgttctcgcagaccttctcgtgttacgatgcggtggggctgagcactggagggttgctcatgttctaccgcgccgtgagagcggactacattcccagtgtgtacgtgcgctcaccgctgtcctcggaggctgaggccgatcaactgcaagctatggtgaggaagaacgaggaccagaagcgccacgcagtcaacgcctggttcgacgctgctacagacccgactcgcgtgctgacgaaccaggacgaacaccgagcgtgctttgtcgcgcagtgtatcgacacccagcagccgtgtggtctgttggcgtgtacagactccatcgacacggaccaagttgccggctacgcgcggttgttctcggatatctaccggaaggcgaatccaatgccagaagagctcccaacatcgacaccaagtccagcgcctgttgcagcgtcagattcctcgccaatgccaccgcctccagcagccgcgagctcgtcaattgcgccagcgcctgcaccaactccactacagacaagctctccgcgaagtctgactcgatcggttggtggaccgcctaacataattttgcttggacccaccgggtccggcaagggcacgcagagcaagaggctggtaaaggagtttggggttgtgtacgtttgcgctggagacctcctatgcgaggcagccagcgatgcgtcaggaaaatacgccgacctcaaccgccttatgaacgccggtgaccttgttccggacgagatcgtgcaagatctggtgctagctcgcttggttcaaccagactgcaaggctcgaggctggctgttggagggatttcctcgcacggatacccaagcgcgcgtgctgatcggtcacggtgcaaagcccgatgtagtggcgattcttgagttgtcggacgacgatgcgagtcagcgtgacggcgacgacgatggagaaagcgaagcgaaggcagcgccgtcttccgcaccggtgggtcgcagactcgccctgtaccgagagtatcgagaggctgtgcgccaaaactttgtcaagatttcgaccgtgatccacgttgacgccgctaaatctcgagacaccactacgaggaagctggtgcatgaaatctaccgagcccgagggtctcgcggtcctcttcgagtgcgaaatccgccacgcttgatcatcacgggagctccagcgagtggtaaaggcacacagtgcgagcttctggtgcgcgcgctacacgtcgtgcacttgtctactggtgacatgcttcgccaggccattcgcgatggaacgtcactggggaaacaagcgcagggatacatggacggaggtcagctcgttccggacgagctcatagtgggcgtggtgcttgagcgactagctcagcccgattgcaaagcccgaggctggcttctggatggcttcccgcggactgaagcccaggcacaagccctactcgccgctcgcacaattcctgactgcgtcctggcactggatgtgccagacgatgaagtcgtcaagcgcattgctggccgacggcttgacccggagacgggtaaaacgtatcacatggcgttcaatcccccgccgccggaagtagccgatcgcgtcattcagcgcagcgacgatactgaggagactgtgcgtacacgactcgagcagttccacgcgcacagcaaagctgtcgtcaccgcgctcggcggtgtctgtgagttgatccaggctgacggaacgcgtcccgtcgatcaagtggccgagctgcttctagggggagctgaacggtgcttgcttcgcaataacgcagccattgtgtctctcttcagtatggttcccacgcaccagacacgcgcgcctctcttccttccaaacggtaagctcagaactattgacctcatgggtcgagtgcaaacttctaacctgttatgttgccattgtatcagtatttgagcatttcagggacaaggattgcttactgctgtgtctccccgagtcctgccgacgtcctgagattaccagcggcttccgcttcgtgcgtggagatccatcgatcagcacaatcgccggactgaggcaacaggacgaggaaaataacgttgttgctaacaagaaggcgaaacatgccaagcacgacaaacacgacaaggccaagacgttcatcctgtacgctttccaccgagacgagctgccgttcctcctgaatttcacgctggacttgagtaccaacgacgaactccaacagggacaccacggcgaacctgtgatcgtgaagggtatgggcgtgaagggcttcggactcacggtgcgctcctggacgcacaagtgcatcgagatcctgggtcttggcggcaagaaggagaagaagcagaaaacgcgtccaagagctgtcacgtccgagaccggcggtgctgtcaacaacatttcttccgatagccacgtgaccgacgccggccgcaacacgattcactaggcaggcttctaaaggcccaactttcagtgcacgttcctcacttaccaccatttcttcatgatttgagaggttaatgatggacctttcaagccagcatctcgtactgatactggcgacggagacgggcgtggtgcagtgtggtgctgtagcgttgacgcagagcttccatgaagcacagcaccagcaacgcgtacgccgggtagaacttgtgacgctcgaattgggccaattggtccccactacacagtacacacgttactaaatcagacagagaacaccaccagagcccaacaacgcatgaatcaaccaacctgagcttgagttcgtcactgtgttctcgcaggaacttatcgatggtccctccttgggtgaagatgacgaccgccagacccaattcagccagcgagacccacaccagcgcgtcggacgacagcgccaggcacctggagcagcctcggaaggccagtccgcagctgctcatgagcgaggcgactaccaacacgctgccgatggccagcagtggaactattggcacaggacgcaaaagtgagaccgtggctgtggaaggcagatactggagctgccgacgcaccgtagagccacacgggcgcgtagtggttggagccgaggtagaggctgtagatgcagagcgcaacgcccgcgaccacgtccacgccgttgaagatgaagagccccgcgcccgcgaggaattccgagcacgtctcgcccatgacgtcgatcgatagatcggggatacaagtcccacaaaacacagcacaagaggtctggtggcagcagtgcggacttgaagcgaattgacgaattgagccgagctgcagtgaaacactgcagtggtgttgcctgcactactgtattgtatgtatctgcatttacagcgtcgtaggctagctttacagcagagacctacagcaaagactgcgacgcgcgcattccgccgttgatgcggtaaggttaggttagtcgagcgtagcggagagcttttgttgccttgtctcatggacacgttgtagaccaccactaggttggacctgtacgacttgacgcgactaggacaagcaggtcacagtgcagtgcactacaggtgtaggcgctttcaaggcttgatttgatttacgttaggaaaaagcacgaagaataaaacgctggcgctcggggctggcgctctagaagggcagctcgcccgagatgacgtcggcgcggccgatgacgtacaccttggcgccgagctcggcgatcttgtcgtgcggcaggatgttgcggccgtcgaagaagaaggcgggcttggtcatgttggcgtagatcttggcgtagtcgagcgtcttgaactcgtcccactcggtgagcgcggcgatggcgtgcgagtccttggcggcctcgtacgggtcgttatacactgtgagcagcttctccatctgcgggtggttggtggggttcacgccctggtactcgagctcgtgcatcatgtcctcgagcatgacctgcgggtcgtacacggccacgttggccttctcctccagcaggtacttgacgatcgtggccgcgggggtctcgcgcacgtcgcccgtgtccttcttgaaggcgaagccgaagatgcagatcttcttgttggtcaccgtgttgaacatgcggcggatcatggtcgtggcgaagcgcgtcttctggtactcgttcatggtcacgacgtggcgccagtagtcggccacctcgggcaggtggaagctctcggccaggtacacgaggttcaggatgtccttctggaagcacgagccgccgaagcccacggagcagttgaggaacttggcgccgatgcggtcatcggcgcccacggcacgggccacttcgtgcacgttggcgcccgtggcctcgcacacggcggagatcgagttgatgctcgaaatgcgctgcgccaggaaggcgttggccacgagcttggacagctccgaggaccagacgttggtcgtgatgatgcgctcgcgcggcacccagtgcgcgtagacgctcacgagcttctcgacggcggcgtggccctcggccgtctcggcgccaccgatgaggatgcggctgggcttctgcaggtcgtcgatggccgtgccctcggccaggaactcggggttggacagcacctcgaacttgaggcccttggagttggcgcgcagcacggccttgatgctctcggacgtgcgcacgggcaccgtagacttctcgacgacgatcttgccctccgtggccacgtccgcgatcctgcgcgcgcaggcctcgcagttcttggtgtcggcggcgctgccggcgccgatgccgctcgtcttggtgggcgtgttgacgcacacgaagatgatgtcggcctcgttgatgtacttgtccaggtccgtggagaagaagaggttcttgttgcggcgcgcgtccacgagctccttgaggcccggctcgtagatggggatctcgtcgggcgcgttccacttggcgatctgcttctcggacacgtccacgaccacgaccttgacgtccgggcagttggcagcgatcacggccatggtggggccgcccacgtagccggcgcccatgcagcagatggtcattttgaactcggacatggtggatctaatgtgtttgtagtcgctaggggctcttgggctgttggggcttgctcttggatcggcggcgcttgcgtggcacttggcggattcaatagtgcgtggctcggcggttgggcggccgcgcgcttgaactgaagggacggcgcgcgcggattgggccgtttttccgcgaatgggcggccgcgagatcttggccgatcttactgttagctcgggctctgttgctcctgcacgacaaggtgacgaccgcgggcagatggaggcggaaggcatatgggcgccgagatctcctccatttctgatggaggcgccaccggaagcgagctttcgttatcctccttttcaacgggtgacggccctcgtgtgtgtggcggaaattgcaggccccatctgccgaccaatcacgcgcggtcataatcaaaacccaagtcctgaagttcaggacgtgtgtgcactttaggataggaccgatcattatacatgtaggccaagctgcatgtcaacaacgtagaacttgcaaaagaagctcactctactggtaattactactggatagaactcactagcgagttaccgatgcagaaattgcagctacactcggctcgagaggcgagctgtaaaggatacaagtgctgggctatcacagcacgcgtccccaatctaggcttgatcccatctgcacaacgcttcaatgagctggagcctgtcgttccgcgccccgtgtccgcatgttagatactgtagatatgggcgacacccgctttacgtgtggggtttcctcaaatcgtcacacaaaaagcgaatctgcacaagcggcgatggaggagagctaaatattcggggcgaggatacagtaccggtaaaaggaaaggcctaggatgtgaacagattagacaatcaacgcgcttgatgcgtaaggttggtggccggccaggtggctccgtcgcacgtggagcaaagccacgaagcgcgtcacctggcgttgtcttaaacgaaaagagcagcgctgtcgtttcactcgaacctaaactattgggttcagcttgcaatacaagaacaacatcgatcaaaatcactgcaaatatggcgaggtgcgttttgggctcttcagaatctagccaaagtacgcttacagacaaacattatatgagtcgagaacgccgcggcacttgcatagcgctacgtagtatgtacatgtactaagaacgttgtaccagctcccaagatcatagcatcaacatccgtaccctgggatagttttctgattgtcatctccgacgaggtaattcacatagcgctgagtccaaaaaaggaaacacagagcacgctcactacgatggaaaccagcgtccccattattggcatttatgcatcctagtaccgataggcagcgagctttttttgctttagtttaatgccttggcttcgtgcgtactcctgagtgcactctattcttgacggcccggccacctttctaaaataatacggcaaggggcactttacaaatgctgctgccgatggagttgcgcacgaatcgcgatcccgacggacagctgcaatacgcaccattccgccccacgctcttcgctgatccaggagacggtaggaacgttttacgagctcttcgttcgcatttctgtcaattaactcacgattaatgctcgtaattagagcttgcagcagcacgaggtcccgggtctctctttcatgaagaatggaactcgctcgctggcaatgctcagagatacaaaccgttgtcactttatcgcactgagcgaaacgtaaatccgacccccacagctactgtccagcggttctacaacccccaagagtccagcgaccttggtactcagctcaaaaggaagggcaacattgtgcctgctctgaagtcaagcgtaccgaggttcaacggttctcctcaccaagccccacagcgcggccctgggtcgtattttcctgatagagtacgtaaaatctttttaccgactcattttaccacttcacgatctcacaaactcttcttgaagtaccaaggagcatttccagcactcttcgacaaaatgacaccacaagtcgtgcgcctggaaaaactacaggccaaacgagcgttggctgtcacgttcggtattgtgccgaccccaccgggtttaatcccagcctcgataactttatcgttgccacgccgcgagatttcaccccgatctcgccgagatggtagcgcaaatgcggcccgaggagagagagcagctaatttcccagatatcccggtggggacgacacgactctctcctgcattgactccacgcaatgcgtatcagagtgctgcaaaccggcagtttatcctctccataagtcaaacggaacatgcaccagaataatcaatatgcgcacgcaattggcaaatcctgtaagaactgtattagagagtttagtttctggactgagtctgactttctattacatgcactatttagtgcactaaatatgagggcaaactgatacaaagcacaataaagccatgcatgaattttctgtaaatctcaatttaaagaaaatttatttgaatacgatttcgatttaaaacattgatggcattgaaagtagctgtcgaaaatagaattaatcctaggtaatacaataaatccccactcctacttagcagtaaatcatagaggctttgaatacaaggtgctcaagtcttgttttgaagccgatctggttccgaaatgattcttaaacggattttacaggacattaccaggacacacaaaattgtagtattttgtccaatcagaattaaattaacatagcatcgcagttttgcctgtgcttggcctcaccgcaacagcaaacatgccataggctgccccacctgcacaatagtataactttacctcttcatcatcacgaaaagctggccgagactgggccggcgtaggcggttgtaatttattgccaagtcggcgttgaagcacgctaatacggccagctcttcttcgacaaggacatcgtcagcgatatggcgctcaacaaaagtctaattctatgctcaccacccacgccgatgactccgttctactcgtatcaggaaacaaagtggccgagggcttcgagtacaggtgattcggtctcgggtggcatgctggcctggatctcgacgggcaggagatgacgcgcgcagaccagcaaccatcaagactgagggctcgctacggtagcgtcgtgggcgacttcgttgaggacgatcacgatcacgacaactagctgatacggcagctctggtatgggtgttcggcggaggctcaaacgtgggcggcttcagcgggtcagaccctaagggaaggtgctgcatttgctcttcgctatccagggacactacacatacaactgccatggcaagcgtcgacacagcatgtgcccccgcaattaaatgttgcgattagcactgggtaatggagagctattgttcgttcatctttcagcgttcatatacgtactggttcgactcggcgttactgctgacttagttaaaaaaaaaagtgttgagaatgtatgaaatgtatggctgagcttagattacgcgacgaatcgtgtaggccttgatggcttcattctgcttgccctcgtacaggttgcagagctccgcccacatctccgatccggtctccttgtcgcgtatctgctgaagaacgtccggcggcacggacgtacccgccatgcgcatgatcttgagctgcgctgcgtcgaaagcctccagcctctccgcactcgcagtcgtgagcataacgaaggggtgccgaagaactggagcggcaaggattggcagacgtacaagtgggccatgatgaacgtgttcaaggagaacaagctcaaggagatcgcggtcggagacctgaccagggcgatactcgcgactgcgagtgcggagaggctggaggctttcgacgcagcgcagctcaagatcatgcgcatggtgggtacgtccgtgccgccggacgttcttcagcagatacgcgacaaggagaccggatcggagatgtgggcggagctctgcatcctgtacgagggcaagcagaatgaagccatcaagacctacacgattcgtcgcgtggagaacgagatgtggagcatgaagctgacgcctggaggagacacgaacctccatctttgcaggatgttcaacctcaagaccgagttggcggacttgcagcatgttattgcccataatagaatggtggatatgctgcttgagagtttgccggaccagattgagtttgagcggttgaagtcttccatttactacggcgcggacccgagcgtgtacacaccgaagcgggttcgagaattgattcttgctgcggccgctcgacagaaagagttcagaggcaagcgtagtgagaagcaagggggccatggtgggcaacgagatggaagtggcaaaggaggtgagcagagcaggactagtgggtcaaagaagacgcggctgtgttatgtctgcgggagtgataaacatctcaaggcaaattgcccggagaggacaaagaagcaaagcggtgctgatgactttgagcagaagcgaaaaccgcggggaaattgtaccctgcaccaggagagtggtgtttcatcgagtccgacgcaggatgatgcggatcctggtgttgtgacggggttagtggcggaggagcagccagagatgcacgaggagctacgaaatgcacatgacgagcacgtagaaccaggaactacttagtgatcacggtgcagaaggtactgaggtactactggaggacagtgatcaaggtgctgcggactacggcagtgggtggtggttcttcgacactgcgtcaaactcacatgtgacggggaatcgctcggactttgtgtcgttcacggctgacacggcgggcatacggactgtccgtggagtgactccaactattgcttcacgcattgcgggcgtaggaacggtggcattggccacagaagtcggtagtgaacaagttgtaatgtttctggacgatgtgtttttcatccctggagctgagtatggactgttttcaccgggactagcgtacgctcaaggatttgagtttgaccatgacattgcaactcgaagcttcgtcgtcttaagagaggggagagcagtggctgtcgctactccgcaggaatctacttgggggttccaggtgattggccctggtgagcgagagcaattcacccctcaggatcgtgctctgtgcaactacactgctgcagagggagtcggctcactggcactttggcacgagcgtctgtgccacacttgtccacaatatttgaagaccatggtggacaaaggtctagtgcgtgggatgctgctgactcagcggaaagaggacacatgcgatgcatgtcatctgggcaaacagaagaggaagacgtacaggaagaatttggatcggacaaccaaggagccgaaccaggttgtgtacgctgacctcctaatccccagtaaagactgcggtacacggtatcaggccgtgctgatcattatggacggatactctcgcttcgtcacggtacacctgcttagtgacaagcaaagtcctgtgatcaacagactcatgcaggagtatgttctctgggccgagcggcaggcgggtcgtaatgtcaggggtgcgttgtacaaagtgcagcaagtgctgacggataagggcggggagtttttcaacgatgaaatgacaacctggtacgattcgcaagggattgaacatgtgaaagtcggccctaaatcctcacaactcaacttgtgcgagcggactcatcagtcgctggagggcatggcgaaggcgacgatggcgcaagcaggcttcccccggagcctatggccggaagcactgcgaaacgcggtgtacgtgaagaatcgtgtgtacaataagggcacaggcggtgttccttacgagatgatgtttgggattcagccggacgtgcaccatatccggaagtttggtacactggcttatgtacacgtgccggtgtctcctcagcggaagaagcaccacaataacgctagaattggctttgtgcgcgggtatgcagaagacgtgatcggatgtaaggtctattttcctgacgagcacactgctaagttcgttcctgatctgagagtggctgaggacgtcatgtaccgtgatcgctacgaagtggacgtggatgacgaggacttggagtcgctgcacttcgtcagacgcacggtgaccgacgccagcgacaccgacggaagtgatattggtgatgccgatcaggcttcaaatacgaacatggctacacgggcgagtacagtagtgtcgggactagagcaaagcggtaaaatgcagtctacttttgaggacgccgttgacgagaatgttattctcgaggcgggagatgaaagccaagctgttgttgatgaagagtcagtgaatgaagagcagcaggacaacagtggtggtaccgacgagactggcggcactggcaagcgcctcgatggaggcaagtgtggaattcgtacgcttgcgactcctgcgaacgatgatgagaaagtcactgacagcggtgaggacgctgctgaagaagacgacggtgctgctgggggtgacgacgccgtgtcggtaaccggaacgtgtgggtaatcgctggtaggaggagtgcatagtgatgctgaggaagaggaagctgatgaaattctcaatggtgatgatgttactgtggcaagtgtcttggctccggacgagcacgagggagatgcaaacctgtcgcgcactcagtcactgcaagaggacttcggtgagaccgaatcggtcaagagggtgcattcgagtggtcatgcagcggctggcgagattattgacgctagtgtgatgttcccactgccgatgaatatcgggaagcggtcgcatcgtgacgaaactccgtcggaagaggtgcgcgtcgagggagatgcagcaaagacagatgtgaagaagacacgcaccggtcttcgcgagtacgacgagcgtcgccgtcccagctacttgaaggactatgtgatgaacgctgcgctcaatacctcgcgtactctggacaagaatggacgacccataagagcaagtaatgtgaagattcctcggaaccacctgagatgatgcgttctaagtggcgagagttctttctgatgggcgaaatggaggagattgcagcgctgaaagccaaaggtgttatcatggagattcctggcgaagagatgcctgaggatgcactgctggtgaatacgatgtgggtgtatgacttgaagacggaccaccaaggatatgtgatccgcttcaaggctcgcattgttgcactgggcaattaccagcgacccgggattgactttcgtgagacgttcgcccccgttgctaggatgtcgtcgttccgactgctgctggcgatagcagcggcgctgggactgagtgtgtttggtggagatataaacaccgcatacttgaatgctcgtctgagtattcggcagtacctacgatcgatcgattgctatccctgcaaagtgaatgggcatgtgtacgtggtactgaaagcattgtatggactgcggcagtcaggtcacgagtggaatacggaactgaaccagtggtttctggatcacgggtacctgcgatctctgacggagccgtgtatgtactatcgtttcgagggtgagatgatggcgtacgtgctagtctacgtcgacgatattctcgtagcgacaaacgacgagccgtacaaggagcgcttgttcaaggaactgaacgaagcgtatgggatcaaggagcaagggcagctggcgcagtacttgggcgttgaggtcgagcagaccacggagcggattgcgattcgacaggagaagtacgcaaatgagattttgaataagtttggctacagtgaggcccacgctgttgggaatcccatggaagtgaatgtgcgtctggcgccgagcagtgatgaagtggtggcggatacaagcttcccttaccgtgaggcagtcgggatgctcatgtacttggccaccagtacgataccggatttggcttttgcggtaggacagctgagtcgctttgttgcaaagccgaccacaaagcatgtgggcactttgaagcgggtgctgagatatctagctggcacgcgcaactatgggatcacctactctagagggcagatagtttcgagtgaagtggtgctggaaggatattgagatagtgattgggcaaatgatcctgagcaacgcaagagcactacggggtttgtgtttaccctagctggtggtgccattgcgtggatgtcacgaagacaatggatctatgccttgtccacggcagaggccgagtatgtagcggcttgtgaagcaagtatggaggcggttgcagagagtaatatcttgcaggagatcctgcctcatcacactatccggctacggattggagtggacaaccaagcagctcacgtgatgactacaagcccgacctacagccgccgcacgcggcacattgagctacgttggcactatgtacgggagcaaatgcagaaaggagctattgagctgcacaaggtgaagggcgagcagaaccctgccgacacgttcactaagcctcttgacaagaagagactcaaggcgttgctgttgctggccggtgttggaagcgtgcaataggcgaagagtgctcttcgaggagggcgtgttggaatgcatatctgagacctggtcatggcagttgagacgaaagctgagaagcagagaaacgcaggtcgctgtatgggaacgggtaggaacccgtgagtgttggtaggagctcaggcagtgagcagctaacgctccatcaattcagtgttcattttatccttcgtaggcacaaggtgctcggatccgctgcaggttccattagaagcacgctaatacggccagctcttcttcgacaaggacatcgtcagcgatatggcgcttaacaaaagtctaattctatgctcaccacccacgctgatgactctgttctactcgtatcaggaaacaaagtggccgagggcttcgagtacaggtgattcggtctcgggtggcatgctggcctggatctcgacgggcaggagatgacgcgcgcagaccagcaaccatcaagactgagggctcgctacggtagcgtcgtgggcgacttcgttgaggacgatcacgatcacgacaactagctgatacggcagctctggtatgggtgttcggcggaggctcaaacgtgggcggcttcagcgggtcagaccctaagggaaggtgctgcatttgctcttcgctatccagggacactacacatacaactgccatggcaagcgtcgacacagcatgtgcccccgcaattaaatgttgcgattagcactgggtaatggagagctattgttcgttcatctttcagcgttcatatacgtactggttcgactcggcgttactgctgacttagttaaaaaaaaagtgttgagaatgtatgaaatgtatggctgagcttagatttctttaactggtacgactaaaatgctccttggtctacagagcgagccatgaatactgtatcttcctggtgggcacgctacgctaacggacaccacgtgtgtgttataattctgcttggcgcattagctcggaagtttgctgcattgcgggtgcggcatccgcaatgcagcaaatcttgcaggacatgttgtcctgcaaaagcacaaaagattgactttgccaagcttgtgccaataatactagattttgggtaggatttgacgccgggatgtttcgatttggaaaatacaggacattccgtcctgcgcttatgctcgtgagccagatcgatgtcctgcaaaatctggagaatgacaatttctaaaagtgccaaaaggatgctaatccgtactagatctgctaaatcatgcaggatatggtgtatgtgctctacttagtgccgatggaccatccacgacttacagcaattcgtactcgagtacaacttatagataagtcgtgctcgatacagtccaaagtgccaaaaagtctgcaatgcacaataaaacctaaagctacactaagtcagttttactgaccccatcgcagatttatttagcacaagccaagcggagccccgcgagcgcggctcttgacaaaagttgaagccaagcctacaggggccgcttgctcggcggcgtgtggtccacatacagtcttgtaatatggacggttcgcgcagcccacgtgacttgaccaatacaaatcgtaagtgaaacgtgacattatgcagccaacgctctaaaaaagtgggtgcggtgcttcatagttaagggatcgtacttaggcgctaagggcgccagaaatatatatatatatatatgattacgcattacgacaggacctgccaacactatacagagagtagcggcaataagaaagggtcaacagcttataattccgacaacacattaatattgaattataaagagcctctatttaggtactgagtttgtcaaagtgatgtggcatacaagtaataacgtacctaatgtgtttcatttatttcgttaagtcaatacgtttaaagctccgtaagatttgatttgacttgattattgtatataccttcagtactttaatcgttgaaccctttcttattgccgctactctctgtacttcttggtgaaattttgggtccaaactacactaaccacagtctcatgttattcacgactataggtaggcggtgtatggtgctagcgctcgaatggtattgtcaaaccgattcgcttatgggcttaaatgctcggtttgggaacttggccctagacacgatcgagcacatggccaaagaccccaaatcggccatcaaggtcacggaccgaacgcgaacgccgtgcctggtgtgtgctcaaggcaagcagactcaagagcgacagccgaccaaagacaccggagctcatgcgccaattgaaaaggtcggtggtgttatttgtagcgacctgaagggtccaatgagacctctcgatcgcctgggcaaccagaacttccactccaactagtgcaaagtattcttggcgattatgaagaatgaagtggccaggaaattccatgccttccttacggagttgtcgaatccacgtcttacgcactgacggcggaggcgaatatcgcagcgttgacctcttttgcaaagagaacggagttgcgaggcagatcgtagaggcggggaaccaagccgcgaacgcgaaagcggatcgtatgcatcgcacgatcctcaacatggtgcgatgtatggtctttggagctggtctaccactaagttttgggggtgacaccgctggctacgctgtgtacatcctcaatcgcagcccgacccgaaccaacgaaggacgcaagtcgccaatcgaggtgttaaccggcaacgtccccggcttggacgacatcgtagtgtttggcacgaagtgcacagtcttccgcgatccaggcaagcgcgcgatgaagaagacagcgtgcgaggaggtcattgtggggaacgacgaggctactaaataatacaaagcctacttgccctcggagcgcgaggtgatcatgacagagcacattcgaaacttacagaccatgacgacagacccgcgcatgctgccacgagcactgagagtggatgcgattcagcgggtagtgcggaagcatcgacggagccgctgcagcgtcgccggtcccgacgactacgacgcaagtcgcgacgacaggccaaagctgacggcgacgttgatctcggtgctccacggcccggaagggacgagctcgcactggcaagtgcggtggcagatgatgttccgctggaggagtcaaaattgcacacaacagaccccgagccaaagagctatcaaaaagcgaggaaatgccccgagagcgcgttgtgagcagccgccgagcaggaggtactcgccgctctacaagccaataacacatggatactggtgaaatgctagcccacggcgccacgcctccacaccaagtgggtctaccaaaaagaaacgaacgggagctggggcgatcaagcgatacaaggctcgactagtcgcatgcggcaacgagcagattttgggcgtctacttcttccttgtgtttgccgctgtgatcggcatgtcaagtgtcaagatcattttcgtgctcgcacatgtagggggggggggggggtccggctcggcacggtgatgtgctgatcgcctacgtgaaagctgctacggaagatgggatagtgatcttgcggttcgtgccagacggtctcgtggtgacggacgtgcaattgcgggagcttgtagctacgagagcgaaggacgtggcgctgcagctcgagcgcagcttgtacggcctgaagcaggcaggaagactctggcacaatcacgtgcaccacaagttgcttgtgctcggcttttaacagtgcgtcacggactcctgccttactatctcgctgacgaagacgggataaccatcatcggcacctacgtcgacgactttctcgttacaggcacagatgccggcagggtgtatgcgttctttcgtgcgatgtgggatctggcgttaaaagacctggggccggtcagtaaggttctcgggatatgtgtggagtacgatgctagcagtgactacatgttcgatcaagaggctaatatttcggagatgctggtgaagtttggactcgagcatgcacatggtgtgcgcgcgcctattggaggtgtaatgggcctacattgactcactactttagcttacacgtgtgcgcatgtgtgtgaggaagcgtagcttagtttaaactagagttaattatactcggacctccgagtatagattaatctaaataaacgatccaaataatgtttttgggttaaaatgagaactgctatttttgttttatgctgacttcctctaaatgtaatattctaagttaggaatctgccaacggctggttggcagaattccaatgctatacatgtcgctcattggctaagagatgctgctctcagccaataggaatcctaagtctctatatggaccacccgtcgtggtggtcgtaaatgtatgtagcctttgctgtgtctacaccaaggtcgagaaaggctttcgaacctctaacagacgtcgtgtctgttagagttacaagtgactgtagccacttgtgcgtgtaaccctgttacaccatcccccctcaaggttagacgcgccaagtcacggcacgtcaaccaggaaattgaccactcgtcaattcttcatgttgggagaaagaaaactcgagctcattcggcaatgagctcgccgaagaagaccgccgctgcagcagaggggaagacctccgccgggacagagactctctctgtctccgagtacttcgagcgtcatgaagcaaagcgtgacgctctcgctgccaaagctgcggcggggacaacccagccggagattgtcctcgaaggttcctctgtagtcagcgacgccgttgactacggggacggcgacgtggagatggaagagggcaaggcctcttcaatcaagcgcaaggagtctatcgacagcgattgtctcgacccgcatgccgggttgagacgccctcgtgaaggagacgaccccaacgcttcgagctcgaagcgttcgcgcggcgagagcgacactccgctctctgctgctggggctttaagctccccgcgtgatgtggcgtcttcaagctatccgcgcgcttctcaggcagcgcgcgatccgttgatgccgtctgcgtcagagatcgcagaccgtatgggcaacaccgtgcctccaaatgaaatcccgctgtacgtatgcagcggcatccacgacgatgctgtggcggaggagcagcactttgatccgttaacgaatcaaaggagcgattactacatcgggcacttccacgagctcctgtacttctccagcaagaagacctcttctcgcagcaaagtgcctgagtggcaggcaccttgtcaaagttggaatgcttttgttgagaacttcaacaagaaaccggttgcttatcgcgagtgggttatgcatgcccgtgaaagcttcaagacattcttgacgcgcgggcggctagagcagctccacagatcctctgtggacgctggcattccatgcgctgtgcccgaaggccaacagtgcacgttgtgtcttccgggtgcggcgcgcttgagcgaccgcgacctagctgggtacacgacgattcgtgtacctgcgagtctcaaggatctccgtgccaagtttctggcacgtgaggaacgcaacgatcgtgggacttcgggcgctgcaggtaactacagcgctcacactaccttcgcaccggcagtgcgtgatgagcttcgtacgccctcaccttttccggaacgtcctgcagcaggacatcccgcggctcccatatatcttggtggggcggaaaccctctccaacgaatacgataacgaaccggctgccggtttgttttcggggtactatggttcacaatacgctcaactatccagcgtgttgagccgcgggcgttgcggatcggaggcggcggtggtgggaatacgccccgggtatggtcaacctggggttgaccttggcctgacgctcgaggagcgggttgctgctgtggaacagcatcagagccgggagttcgccgctctgaagcaggaggtggcgattctgagggctcaagtcgctcaggcctcgcagacccggtcggacatctctgttgacgtgggaggtcgcgtcgcacgcttggaccagcgggtgaacgcgctggagcagaggttcgctcccgatggggcttccgcttcgggccagccgagctaggtggctcgtgctgccggcatggcttcagccgcccgacgtaaaaggtcggatggaggcgcacgctagatggaatatctagcgtgtaggcgttgccatgccgtaccaacaccgtgaatggcccgatgaagcacggagcgagcttgctcgcccccaagtcggaaactgcatgtttaggcacgtttttagtagctaacaaaacctatgaacccttcttgaattcatttgtgttgcccctgccaacgttgtccgcgttcagcttctgtcgatcaacagaagctgcaatagcgtcttggacaaaccgaatgacggcttgtctgcactgcacgaagttgattgcgcccgagctgaactcgttcagctcgtttccagcagtaggcccggcctctgcgtttgtcttcgcggtgtttgtgccctgcacagatccgttcttcttcttcttcttgctcttgtcggcgtctgtgccctacatagacgcgtgctttttgttcttcttgcgcgtagtcgcggctgacactgtgcaagtgtcagcggcattctacggctgctgcgttgcagtcgaagatcctcccccacttaaggaaggagccaccatcccgagtagactcgggaggcgtgggtaccttattgcattcacgtagaacggcgtatgcccggtcaaggcatgcaccgagttgttgatgccgaactccgccatcagcaggcactcgctccagtggtggaacgagtgagcgtagctctttagcgcgtctacgagtacgcggttcccgcgctcggtctgcccgtccgtctgcggatggtccgcagccgacatcgaaagttgactcccaagaagtgtgaacactccttgccaaaggtgtgcagtgaagcgcgggtctcgatccgacacaatgtcgatcagcataccatggtgtttgaacaccatgtcaacgaacagacgcgccgtctgcttcgcagtcacttcagcaggtactgcagcaagatgtaccatcttgctgaagcggtcaacaaagaccacaacgcccgtgttcccctggctgcccgggggaagaccgaacacgaagtccaaagatatggactaccaacactccgacggagtcggcagtgtctgcaagggagcctgcgcgaaaggcacaggcttcacatgttgacaaacctcgcaagcacggacgtacttgcgcacccatttatactggtgggcccagtagaagtcccgcgtgagaagaagatatgtcttctcacggcccggatgccccgcactcggtatcgtgatactcatacatgagcctgagtcgcaggttatggtcattggtcacgacaacgaagtccgcgctgtcgtcgtctgcactgtagagtaataacccgtcgtacacccgatatcggtatgcacgagcacgaagatgcttcggcagcttctgacgggccagcaagaacttcgcgtccgcgtcgtgcgcggacgcgaccttcacgtcgtccaacagtgacgacgttggggtgctcgatcgcatggcgtcaatggcattgacgtcggcatcagtcgtggcgtagtcaggtcgacgcgatagcgcgtcggccaccccattgagtcttccgggttggtactcaaccccggaagttatactctgcgaagaatgagagccatctgaccatccgttgcgagatgtgcggtgacttcacagccgttcgcagtgacgcgtggtccgtatagactacgaacggtttctttccgagtagatacactcggaacttcgcgagtgcgtacttcatggcaaggagttccttgtcatacaccgggtagttgcgctcagctggattcagctgacgcgattggtagtagccgacacgatcacgagggtcgtgatcgtgctgcatcaacgcacatccgattgcgaagtcggatgcgtcgcacacaacgtggaacgggcgatcttggtcggccaccgccaagatcagcgcctcagtcaagccctacttgactgcatcgaaggcctgctgaccctcagcagcccaatgccactcggcttccttcttcaggagctgtgacagcgggcaaatcgtgcccgcatagtccttcacatacttgcacaagtacgtggtcaagccaaggaactgccgcagttccttgacgttcgacggcgtcagccactcattgatcactctgaccttctcagtgtcagggcggacaccgttcttcccaacgagacacgcgagcacgtgtatctcgctcgccccgaagatgcacttcttcaggttcgcatagagcttgtacttgcgcatgagcgcaagcagcttccggagatgcaccttgtgcatctcaacatcgctcatcccgtccgcagcccggctgtggacaaacacatcatcgaagtagctcggtgcgaagtcgcgcaccgagctcaacaagtgcgtcatgcacctgttgaaggtcgcagaggcgttcttcagaccctgcggcatcactagccactccaagagcatgccgatcggcgtgctcacaaccgtgggagggatgtcgctctcacgcatgaggatctgatagaacccatcgcgcagatcaagagcactgtagatagtgctcctggccatcgaatcgatgatgacatattttcgcggtattggtgtctgcgccggtatcgtcgcatcgttcaacttgttgtacgcatgaacgatgcgccagctgccctgtggcttcttgacgcagaaggtcggagcactgtgcagggacttcgattcccgcacttgcccagctttgcgacgacaagaagtcgtcgatcgccttgacctgctctcgcggcagtggccactgccgcgtgacacagtacttcgtccccggcacgagatcaatctcgtgctggacgcccttgtcctgcggaagctccgcagggatctctcccggaagcacgtccgcgtactcccgtaagatctcatagtagggactcgttgaagacgagtccctgctctgctcttcaaagcgctcttttatcgtcttcgcactgagcgtgtcctcgctctcagtggtggtctccatgaagaactgcctcagttcttcattctcgctcttcgttctctcgaggcgtccaagagaatacatatttgctcgatgcgtccatcgtgcaagtcacgcgcgaagcgcttccagctcatgactggaagcgaagtcaactccgacgcttgcgtcggaagattagcgagagtcatctccctgtaccggaacccggcacaggtacgcgtcaagacgttcaacgtctcgacgtccggctattcagcctccgtctgcccggcagacagttcttgtagcgtctcggcccaaagccgagacttgcgcagtgaccttcgcatgcgccgtcttcttgttttgcggaacccggctccgcttgggtcttgagtcaagaatcttgacctcgtccaggcccagccgtggacgggtgttcttcttttataccgccggcgggtacatcccgcgggcgagcgacttcaagcccggcttggtcccacggcgcttcgtcatgcagcccggctgcacgacagcatgcaagtttttccggtgcgggacgtttgcaaccgtccgcaccgcctgcagcgtcggctcctggagccgacaccccatcatcacctcgacgcctgttattggcggagccctctattacaaagggtgcgtcgactccgggagtcgacgcaccctttgcgaaatttcttttcgcagcgtcggttcccggaaccgtcgcgactttaatacctcgacgccatccattggcggagacctccattacggagggtgcgtcggctccctgagccgacgaatcaaattcactcaagccatcgactcccggagtcgacggcgttacgtcaccttggctcatattaatgggcaaaactgatccaatcagattcgcgtcagcctccacggctgaggcgtgtgactcgcctgcgtcagccgtgccccttgaggccggagactcttcctgattcgctgaaaagcgggtgtcggcctccgatgtcaacacgtttccgtcatttgctgtcggcggcaacgccgacactagctgctcttgcgcgcgtgctcgcgcgcgcacagggcgctccgggacagcggcattaggcgctgtctcgagtggggggggtcgcgtgcacctgttggtgcgtgtgtggcgaaaacagagtcatccctcactgtttcgcagtagcgaccgaagcgcacgagagtgcgcttctcccaatcgatgaccggatcatgccgtgcaagccacggcatgcccaatacaatgtcaaacttatcgtccagatccaagacgataaaggtttcgacaaactcttgatcttcatacgtgaagcgctcgtgtaccatgcgcttctcggtcttcacgacggcgaccgtcgccagtcgtaccttcaacatacttcgaggtatctttaaatcctcgaagtcaagccttgatagactttgcagtcgaataaagttcttcgacgcaccagaatctaccaaagcgcaaagagagccgcttgctctcatcgagttcacattcaggatgacaaggtcagacttgtcatctttgttcttgcggtgagaatgaatctcactggggactgcaggcctcagtgtcgcgtgtccaaggtcgacacgcggaactgcattaccagtagggcgcccgcgcctactatgctagatagtgaaccggatacatttataccgtaggcggcttggccgcgctaaaaggaaatacattcagtttgagatttacacacacacacgaagagttaagggttgactcttggattccgtaaggtgtacggacgtacgttctggtatttgaacgggctatcttaagctgagactctgtgagtctgttacgtcttcctctgacgctaaagctacggcagccccgctgcacttggtagcacttgtagtcaatccgacatatagactgaccctctgtggagaatggagcagttcgctcacttgcccccgaaccagcaggatgcgcttaaaaagcttatgtccttgctgggcccggagggcgtgacgtaacttgcgcagcaaggccccgacgcggtgaatgcgcgtctcgaggcgttttcaagctagagaatgctctgctaaagcacctccagcagaggatggcaacggccgcggcgccccaagcgaccgcttcgtcatccgacgcgggaacaagacccaagccgctcatgttgagcatgaagaccttcgaaggcaaggagggtgaaagcttgatgctttggacccgtgaggttgagatggctatgagctcagctctactccgtacggagtcgcagcgcgtggcactagctatctcgaagctcggtgggcgagcgagagagtgggtactaacgtccgggacgttggtcgaggtggccttcccgacgtgggaccagctgaaacagcaattgtctcgagtgtttgctccgcctaacgaggcgtatcgcgtgcgctcacgcttcctggcaaccaagcagagcaagaaggagttgatggagagttgagaactctcattgctggtatgtccgcggaccccctgccggaggcagtcaccgttacggtgttcatggagtgcctccgcactggcgttgccagaacggaggtgtttcgaacccacccgagctcttttgaagatactgtgagcgtcgcattgaatgcggaacacaactttaagtcgtcgagactcgggtggaatgcgtcttacgctagcgcgtcgagtggtccggaacccatggacctcagctatgctgaagacgaagaagccgagcttcctgctgctgagcagtgtcgcggtatccgcagatgcttcatctgtggtgacacccgacaccttcttgctgggtgtccgctgcgccatcagcgccaagcttcgataagccgctcttcgagttcgaaccaggggtctggtttgtctcggggaaacgagaagtcccagtaggcgtggggtggcctactggggaagaactaagttctattgagcctcggcgaggtggaggtctacaggacctagccccgaagagagccgtactctctaacacggaacgtgtatgcaagccggcttgctagttgtagttgtccaagcttgggtgaagggcttcaccaagccatgtacgatttgatcgattcgggagcgtcgggtaactactcccggcgttctacgatggacggaagtcagcattatgctgaggcgctggtggcgcgcgggagtgacatcgtcacgagtgcccgtgtcacggtgcctaaggtccctgtggacctgggcgtgaagtttttggattttgatagcgtgggacgctgtctggtcttagacctcgattcgagatatgatctcatccttggtatggcgtggctggaacgccacgagccttggatcgattggaggtcgaagacccttggtgctacgcacttctctcctagcggagcattggcgagtcatgaacccacctctgctaggaagcagaagcgcttctggcgcgagcactggaccgagtcggtcaatgtgttggacatcggagtttccgagttggtggacactgaatgtgtcgagaacgagagttccgagcgtggctcgcggacggcaggtggagcggcactaattccgctgagcgggcgtgcgtctgagggcgacgccctgctgcgtgccagcgacggcgcggtcggcacgatgccgaagaacaaggggctttgcccggatggagatcgtggagtggcacgtaatccactgagtggaggctgcggatcgtacagctctttgctgagtgtcggtaaagacactggagctcccgcggagctgaacgaggtggtgacacatggcgtcaagacgcacgcaaaatcacggggctcttcagggctgacggtgtccatgaagaggaggcagcgccgcaaagcgctggctgcgagacgcaaggcgtctgcgatctcacgagtcgagaagggcgtgtcgagcggcgaggctccaagcgagagcgagcagctctatacactcgtgaatggagtgacgggcgacgtcgacggaggtatcaacctcgacgacttgccctcactgtctgctctcctggagctgggcgagatgtccttggccgagttcggggaagccttgaaggctggagactttgctgaggtagtggtaatacgatccgaagaagagttgaactcgtcctcgcttctggatgaagctgtcctggaagacaccaagaaggcgctgaatgtgcggagcggatcggcgatcctgaaggacccgtcggatgccttgtatcaagtggtaaaggattaccaggacgtggtctcgaaggagccgccctcggggctacctccggatcgaggtgttcgacacgaaatcgatttcgttccgggaacgaagtactgcgtgacgaagcagtggcccttaccgaaggagcagtgtggcatcattgacgcgttcttccgtaggaagcacgaggcgggcatggtgcgtgagagtaagtctccacactctacgctgacgttctgtgtcagaaagccgaatggcaagtggcgtatcgtgcatgctttcaacaagctgaatgccgctatcattccggcacagacaccgattcctcggaaggatgttcttcagaacaacatgacaggatgtacgatgtacagtgcgctcgacttggtcgatggatattaccaattgctcatgcagacgagcgacattcctctcactgcggtgagtagcccgagcggcatgctctgggagtggttggtgataccccaagggctttcaaacgcgccagcgacgtttaatcgtcttgtgacgcagctcttcaggccccatcaggcgtacgcgcaaacgtacttcgatgacatctttgtccacagtcgtgctgagcacggaaatactgatatggagaagcatgtggagcacctgcgtgctgtgctcaaatgcatgcgtcaaaacaagttgtacgccaacattgacaaatgcaccttcggagcggaagagatccccttcttagggtgcttcatcgggaagcgtggtctgagggccgacccggtcaaggtcaaagccattgttgactggccggttcccaagaaccaaagggatcttcgcaagtggcttggcttagccaattacttgcacaagtacagtgagaactacgctgagatggctcggcgactctccaacctcctgaagaaggatgcggagtggtgttggaacaccgagcatcaagatgcgttcgcggccattaaggacagtctccttcatgcgcctattctggctttgccagacccccctcgtccgttttgtgtcgtctgtgacgcctcggactttgccatcggctgtgcactgctgcaagcagacgccgaggggcgcgagcgcgtggtggcgttcgaatctcgccagctgaaggctacggagaagaactatcctgtccacgacaaggagctacttgcaatgaagtatgcgctcgtcaagttcagggtgctctcagccgttcgagatttacacggatcatgcgtcgttacgcactgcgactcagtcgccacatccctcgcaaaggatggcccgatggctgtccttcttcgcggagtacaacttcgaggtgaagtacaagcctggtaggcagaatgtccttgcggacgcgctgtcgcgcaggccggattatgagctggctcatgcaacgaccgtgacttcgtcattaccggatttgatccgaacggcttatgccaaggacgagacctgtgtcgcgttactgaaggctctggggagcaaggagtttcaagactcggacatggattcgtcagcgcggctgcgcgcgcggctacaccgttattccctcgatggtgacctgttcttctacaagactgtccccgaggatacgccccgcgtggtcatccctcatgatgaggatctgaagtaccgcatcctctatgaggcatacgacacgccgctggccggccatcttggccgtgaaaagacctacagctcggtgagcacccactactggtggccgaagctgtacaagtgaacgagtacttatgtgcgcacgtgcgagacgtgtcagcgagtgaatcggcacctcatgctgcagcgccgttggcgagcttgactgtcccttcgggctgttggcaatccatgagtatggactttgtgtttggcctgccggcagacgcggcgggcaacactggagtcgtggtcttcgtggaccgactgagcaagatggctcacattgcggctgtaccggacaccatcgatggtaaaggtataggaacgctgttcttggaccgggtggttcgacaacacggactccctgagtcgattgtctcggaccgagacccccgcttcacgggcaacctctggagcgtggtctttgcggtgcttggcaccaagctggacatgtccacggcaggccatccgcagaccgatggtcagacagagcgcgtgaatcgcgtcgtcgaggacgtgctccgctgcatttgcgccgagacgccgaagcgctggagcgccatgctgccactcgttgagtttgcgttgaacaacgccgtgcacgcctcgataggctacacgccgttctgcgtgaacagcttgtctcacccccgcgccccgctgacgccgccgcgtggtggcctcggacttggtgggggaggagaagccggcttagctgatcggctagccgatgtcagcccggctactgttcgtaaacaggttgacgctttcttggcgacgcgtctgagtgtcttacgacatgcgcgtgacgcaatggctgaaagccaagccaagcgaaaggaacatgcagatgccagaggcagaggcagaggcaatgttgaaagttatgacgtcggggacctggtgctgcttagcgctaagaacctacctacacatgcagtgccagccgtcttcaagacgaagttgcgcccgcacttcatcggacctttcaaggttgtggccaagaagggccttgcgtacaagctcaatcttccgaagaagatgcggacgcaccccgtcttctacgtgggcatgctcaggccgaacgtggacccgatgtaggtgcagatggaggcaccgagggtggcgaggtcacaggcgcggaggtcgcggtcgtcgaggacgcagtcgccacgcgaccatcaacgcgggctccgcaggggcaggcgggagtgccgcgggtactgcaggagccgcaagcgcaggaggcgcggtaggcgaggcctgcatgcgggccaggagctcgagctgaccctggagcaaagcctggtgccgctgtagctccgcgaactctcgagcgtgtcgctcttcgcgatcgcgaaagtagttcacccacccgttcaggcgaacgaagtcgttctccaaggtcccaagtcggtcccagacctcccgaggcaccccaagccactccaggcactcagcgagcctgtcgagatcagtcgcacaacgtgccagaggcgcgtcgatgtcgtggacgtggtcccgaaggcgatccgcctgttgccgagtctcgcgcaactcgtcgaacgtcgggaggcggcttggctcgtcctccaccggcgctgctcgatgagcatgggaatctgcattaccatgtggaacgcctcctggcgaagcagcggtgccggggtcaaaccagtatctggtgagatggcaagaataccctcactcccagaacccatgggagtttgaggtacccctccgccaggattgccaagacgtcgtggacgcttttgatcaccttgattaccagcgccccgagggctcaaggccggcacgccggccatcccgcgcttccctgcaataagctggggagctgctgggtcagccacattcctccgagggtgaccctgagccacagcgctcactccctcgcgggaaggagcggctggagtgctcgaaggagcgaagcgcgcagcgctaaactgggtccgcggctgggcgagtgccgagaggctgcgcttagctcgtaccttcgcgaaatcgaagcggagcttgcgttcaatgcgaacatccacttcattgaagctggctcggagagcatccatggagctgagcttccggctgtgcttggcccaagactcgaactgagcttcgtactcaattgagtcttcccccgggctaagtaccaccgggtacgtccgcatggcgggcacggacttctgctgggcttgcagccgcagcctctcgcaatactccgcgacagtcgtagactgtggagtgacgagtcgctctagcagagtcgtacgcgtgcgaattcctccggagtacgggccgcggacccaatggcgtgcagcgcgagagactgccggaacgccaggcgacaagcctccgcggagtcgcgaggccggaagccgtagtcggcagtgctggggttcagcagaggccgcagctcggagcgctgggagcgcatgagagccatctgcgccgcaacctgctcggactgagcttcgtccaaggggttggagatgacgggatccaggggcacgtcttctgcacgtgcggcgaataccgcggctccgtgagctcgagcagctctgagagctcgaaggagcgctggggaaacggattgggagtccgcagcggctgccgcggctcctccctcggtggcgcagcgcgcgaagtggcgaaacggcttggggagcgcgcaggagaactgcgcgcggggcgctcttgatcgcgacggctcggagagccaactggggccggcgagccttcttcacggcgtgccgacggtgtgggcgaagcgtcgcgtgggtggggacgcatctcctcggttcggagaaccctccatggactcgttcacctcaccctcttcaccaaagagttccctaggatccatgatctggagagctggggcttgcgcgctgcgagctgcgcttcaggcgttgcgccccgaagtactcagacaccgagagcctggaaggcgtcgagggtgtgcgcgcgggcgctggcgttcgcgaaggtgcggaggcacacggtacagcagcacgagaggagcgaggctccgaggcggatcgcgcgagaggctttctgtggccgaaagaccaaaaggctttatgccttaaagtcatgtgagggcgcgtggcgccgagaagttctcagagaggtccacgcgatgtggattgactctttcaagaaggagacttgacggaacaagacccggtggttgaccgttaagcgtgaacacccgtgtccacggtttgatgggggagggtgtaacggagttacacgagagttacccgaagggttacgaagtgggtacacactgtctaacctaaatcagtaggataatcagtacacggcttcagaaccacttattatgcatatgactagggttcactatgctagatagtgaaccggatacatttacaccgtaggcggcttggccgcgctaaggcaaacacattcagtttgagatttacacacttaagagttaagagttgactctctggagtccgtaaggtgtacggactcgtacgttctggtattataatgggctatcttaagctgagactctgtgagtctgttacgtcttcctctgacgctaaagctacggcagccccgctgcacgtgaactgtgttacacgacgtgcgcacgcccccaccatggcggacaggaagctgtccaggcgtaaagccctgtatctgagcgggacgcgagctctcgagctctctatgatcgctgatggagagcctagccaaccactgcaaattacggacgccgacttcgttggagacaaaaatgatcgaaaatcggtcagtgcagcaatcgtgcagatcaacggaacgatcatgtcttgtcggtgcaagaaacaggcttcggtggcgctgtcgaccaccaaggcggagtacgtggcaacaacggtgggagctcaagagctgctggggatcaaggaatggttggtaagcttggtgtggcaacgaccctacccatggggatgcaaaggacaatcaagcggctatcgcgcagatacagaccgaatcaagctcagcgaatgccaagcatgttgatgtgaagctcatggtcttgcaagattagaagcagaaaggcttgggggcaccgtgttacgtcgagagcgcggcggtgctggcggacatactcatgaaggccctcccagcaccgcgggtcaaggagctgacggaggcaattggactggtcgccaacatttgcctgaatcctcgagaccctagggaggagtgttgaaagccggtaagcaagcggaccaagtcacgcggcggtgacgacacgcgcgggtctcagttaagccaggttcccgaggggtccgggctcaaaggcgtacatctcgtggacgcggatctgtgttgcatgaagtacgttagctcacagtacgagcttcgcactcaaatcaattcactttcactcttcctcatctacccacaagtgccataccaactagcacgttaatccttgttttagatgcaactcgtgtagacgcaagcttcatgaaatgcagtatccaggaacagtgcatcgttgacctctatacatgagttggaacgatcaaagtcatgatattattatgaaaatatggcatctcagtaggaaacgcatgcagcacctcctatattatatcacttaaatttataaaaatggtaattaagtttgttagacgtaactagcatgatttgcaaaatggcgttccaacataaagaatacgacattcttggtcttgtgaatctattagtactagatatcgatcaaacagcaagtcgaccatttcaaagccattttcaggtagcctgaaggcccattggggccttttaatcatgacattaggaattacgacggctatagctctttcccatattaacttgcgttatatatcactaaaaccgttatatatcaataaaaccggcggcttgcatttacgaaccacagtgcttaagtatcgaaacgacatttggaaatgttaaagtactatggtaaacaacgggatcaattgtaaacggacgtccgtagacacaaacgaggcgcactccgatacagtgctgtgcaagaccaaaacatagtttcagagttaaaccactctcccggtctccaaggtcgcgtcacttttaatccctaaagcgagaggagcagcgctcaaccgagagcgagaaaaacgctcaatacggggcaaaaaagcgtagaggagaaaaacattcattgtttctgcctcggagatggtagcaactgtataatttaagcatgtattgtttctgtctcggagatgatggcaaccgtaatgtcggccagcaccccgtgaggagccgctgtattattctcgtgcggacacgtgctccatgagaagcgtgtttgaaacacgaaaaggctgacttcatcaatgatgtgtagactagactctacactacctccgcaaaccatgcctcgttcggaacgggtagggctcaagtcaaacgctgacaacgtgaagcaagtcgtcatccaccgcaatggattctacagcccacatccagatcttccctctttcggctgttgttgcgagagaatgttttcgattggagggagttccttttgtacgatgccggtgggtttaacacttgctatagcgcaatcgcaacccagggctagcatgagcacacatctagctacaatgaaatctgacttcgcccgcaaataggctacgcctaatggcatcgctatgaaggatggtatacccagggggttgcgattatctgtgatgaagaaagctcctgggttgatctcctctttaaaaagcggtactagaaaggtacgaagagaagcgcattggatctaacaatttggcaagccctggcgtcttagctcatttctgccatcgcttgtgaaccgcttttctgaacggccgtgatagttcagataatctgagtgctgctttttaactaagatatcgatagacggaaggtggagattcaccagcattcgattaccggaaacgtttggtatcatttgagccgcaaccaacgatgagctatgtggtacgaagactgctccagcgccaacacacagatgcaacggtgtatccaaaaaccggaacctttcagtatgatttagagcttttaaacgtgttgggcggtttacctgaagtgccaaaatgattgcggaagattaaccgaggtgaaactagtgaaggtgcgtttttcttcttgcgcaaattgatcaagcgtgaattgagcagcagccattctgtgataccggtcacatgttgttttggttcaaatccaagtatccaatcgttaaacgcggggtatgtaaacgcaacatattggacggaactgcaaagagactaaatcgaaagagtgataggtaaaataagtctttcatcgaacaccttaccgtattgaatatgtagattctggtattgattttgtctcaagaaaaaaataaaaaataccaatcaaaaatgatgggtgcgctcaacaataaaaaaaaaggattttggtgaaatgagcgaattaactaaaaacaggcgggggaagacatatcgtctttcgctataacatataaaacaggggttggagataatattgggtgtcccttgctggcgtgaatggagatgccattacgaaggtacttcccgcgaaaaactaccggtgacaccaactctgattgtgcggtggatggatgtgcactattttggccatgccagtaccactgataatactccgtttaatggtattgccagaagggcctcaggtagcactttgtactgcactgtgatgatactgcttctgtttcaaggtcaccaaacagtaatcaaggaatgaccttcgacgcgcacagagcatgtattacgttcgatagtaaattctatgcgtgagtaatataccagttgctactggctgttactgacaaagctatgtccttattaccgatatactgtgggccccgctgctcagaaaagacgaagtggacattatagacaaaccggatcatatgataccccggtggaggcatccaaaagcaatgactcctataagatatactgttctaggggtttacatagcacaatcataccgaagtcgaagcagtatgttcttcaccacctctctcgataaaaactctaccctcgatactacgatgaagatctacgtacaatgaacatcgatctcgcctacaacgaatgcagaacattacacaaaaccatttgggtgaaggtgttactaatgcttggattaattctcaagacgttcaaagccaccggttgtaacagattccagatgtttttagggtgtgattcgcatttgcatatgttatgtatccttttcaacttcactccgagccaagtgttatcacatacccgagtttgtagctatatctcagccaatatttagagttaggagctgcgctttagatatgttgctgctactaccgttccatgctaacgatcggcatttccatggctattgtgaatatgagtagccactcaatccgacgcggcgcggcggcgtacgccaacgctccacccaagctggcaatccagtgaatctccacgcgcggtgcctgactactggagtcaatcacgaaggcgtttgcctatataggaacaaccacaaaggaggatcagagggtagccaaggttttagcagggtacccagctcctgacctacctgtaacaacgccttcaaatcgtgaccttgagcggcagctgtcggatctggagtttggtcagcttaccgtgcgcaatgcgctcttccaccacgtactcggctttcagtacactcgcttcaaggtcgcctttgatgtgatcgacgtcacctttgcttcactgctcatgcacttggagactgtattagctttgacgtttaagagcagctccttggccttcgtatccccctacctgtacgggttggagcgcggaattgctacaacgaacatgtgtttgggctgttatgttacgatagacacatgctgtgagtggggggggggggggctgagagaccactggcaggctgtgaaccatgctcaagtcggtaatgctgtcgctggacgcgatatcttgctgccttccacacttgagaacatgctcacacaactcgtgagtattaatggccgtctcgaagatgcccaggcacagctacgggctctcagtgtacgcaatgcatctgcacacgcagccttggaagaagcacctgctactgtagagccgtctgtcccaccaccagcaacggcgaccacgcttgctgtttgcctcctcaactggtacacgaaggttaaaagaaagaaagatcgaaacaaagagaagaggcaaaaacagcagtgaatattatgatgctacgctatcataagcatgtcgaggtacatcaggaacctgcgcgaaacaattcaggagacgcagcagcttaccaaaccgggaaggactcctctggacactggctcaagcgatggacactgctgtcaatgagcgccttcgcgccttcgacaaaaataagccctacgcaaagctgcatcgcttcgaaagcgctggaagcttctaaaaacatcgcataccgccgctgtcgcttcgcttgtcgctcagtaactgcgcatgaaatccaacaggcaaatcgtcaggcacacacctctgggacgcaaccaacatgacacaggctccatccgatgcgcttagcacctcgacacctccgtcgctccacgcaatcccgccaacggccagaattgaaccagcatccagaggacacagtccctcacttccccgttaagctacatcggcgtggagcgggcgtggagtgtgagggtgggcgctggcgagtggaatggcgcaggcttcctgggcttatgcttgtgggccttgggctgaaaaatcgcgagtgacaaccgtcgtcgcctgtcggcgtggccgcagtcagctttcagttgacgtcgtcggcacggcgcctaacgcgaggggtgagctgccaccagaagcgctctgtttcctgttttgtgcgagcttcccggagggacgtaagaaggcaaaaggtgaatacaatccaccacaaagcttatttgctcgcgggtggaagaatattcaagctgtacctgatgcagaaatgtaaaactatatctccaatgactttcgtcctgtggatgccagagacggaccgtatcaagttcgtcgtcaccccggccgttctgatggcgctattcagcggaagtttgggctcctgaggcctgactctgctacacttccgtgaagtatctgagatggacacgcttgagaatggatcaaacaagtccaactttgcgagtgactttagttcattggttgtgctgcctccggctccaacttgttgcggcccctccgatgacatcctggatggcatctacggtctcgcagcctttggcaatgaattctggtacgatcatgtacccaagcgcacctcgcgtctacgagtgttcgtggccaagcacaagcctgcggacccaggcaacaatccgacgcgagttcggctcaccctgcggtacgccaacaggttccttgaacatgcaccggatcacttacacaatctgacagcccgcattggtggcatggttactgcgaggcgccccgcaccatcgattaccagtcccctgagtgaatcttcgccctggtgagcgcgctgacttcgtcagatcgaagcacccgtgagcaccgcgacgtgaaccgcgtatcgcgtcgtgaaccgagtcgaggatctgccgtgcctgatgatacttgtctcctgcttccgatcaaccgtcgtggccaggaaccatgcctgctagacgtcgcacacacaaattggtccgatctgcttccagctcgcgtgcaggactgggtggacaagacttacggacgcccggaccgcaaccgtcgctggtgcagcggctcgaggacctttcggaaagacgcccacgttaagcagccaaatacattgtcttactgcattgtatcccacgtcgcaaggcaacttaaaaccgcgctatgtcggtggtcggacccgtcgcactgagtaatgacaccatcaaccgcgagaaaacagagtacgagctggacgtgaccacggtcgccaagtcagacggtgcggaggtgctgctcgaagatcagactgcgacgccgccatcgctgatcaagccagtgaggtaggacaaggtgcttcttacggacaagaacggcgagcagctgcacgtatcggagggttgggagtatcacaccagagcgatatctcctatcaccctcatcctgctcaatgcggatttcgccccgttcgttgatctctaccgtaaacatcacttcatgtgtgcgtagtgagaggatacacacatacggttttaactgctcgagcgtttcaggccaagacgcacaatgatgttttagatagcaagttcacactgttaatgtgcccaaggttggagacatcctcgctccaggtcgggtaaagtacacgattaaaacgttttggggaacgatcaaaagaggtctaaaccaaacatgtgcagtagacgggacaagcgcctatccgggagcgtcgtttatcatcaggaaacggaattatcgacgtgcatctcgtagacatttgcgtacctaagacagactctattttaagtatgtatatccactttctagaatacgctcttcccaggttgggcgcaccgagaagcaagcgcccaggcctggtcgggggcgccgcctctgttcgagcctgtagagccccgatgcacccgcccatacaccacttcgctggctatgctaagtttatgatttcggggctcagttgcgatgcccttctccgcgctcgcattgttacgcgctcgcattgttaaatggatcgatcgttggtagactcaccacgttcacgagcgagcgtggctggtgtttctcgacgtagcacttcaccttgtccagatagtgcagcatgtaaataccgcaaacgatgcggtatggttggcgaggcttacgcacatacccaagtgagtggatcttggaggcccgctgcatcagagtgtattgcttggaataagcacttgagcacagaacacaggtagcccagctcatgcagccctgtcatcgagttcgcgtgaaagaacaccttccccctttcagataattctccataaccagcaagctccaacgctcatcgagatttacaggcagcaaaaaaaagcggaaggtcccccaagccatatcacccgtgatatccgtcgcaccatgcacccggtctgtccggcgcttacacgcaaacttaatctccgcgaagctagtacaggaaacacgagtccttgtgtccgtatggcaaaatgggggagtcggtagtcagcaacggcgcccgtcactatatcccccgccctgatgctcgccaagggttccgcaaacaccggtacggaactgttgacgggcacaggcaccatccactgtcaaaggattgccgacaggtgcgcggagcgcctgagggtgtatgtagcagcgctcgagtcaggctatcaaggtgccgatccttcggtcggttctgccaccatgacgtttgattgaaaaactgcctcgtcctactccgaatcgaactttcagcttcaacttcgccgccggatccgtgagcggattggttggtgggtccatgacttgattcgatgggtcctaattggccgataggctcttgagcttgcgctaattgatcagaaggttctagatcttgagccgattgggcagcgggttctggaactagtgacttggtggtcttgtcttcactgtcgactccagtgtgctctgcaaccgtagcgccgttgctcactcgttgcttgacttttgccagagctgtctgcgcgctttctcggagctttgcacgagccgccaccgtcccctcgtgcatgggttgtagcggtccatgaaccgccggacccgtgtgcgctgagtattatcctcagtttatcgaacacggggattttgagatacaattccatcatcttgttgagcgtagcttcattgttcgcacgtagaaacggattataaaaggttagtaatcaaacgtatactggggaaacctatatttgcccccccacccttcacagggtatcaagcgttggtatgctctggatgcttggacatgtctaagtatttttttgcacccggcctatatttttacgagcgcatgggtgtgcgactacgagttgacgcagttacggggggtgcagaacttgagcaactcaatggtctcgtgagattatctgagtccgaaatcagcactttctcattttttccccacgtattgtacaatgtccggaagcgcattcgacatttgcctgaattggtccgcgctgctgtctattgtggaatattagatatgcattacgctcttagctgggatatacttgttacagaatggaatcaaatttccgtggagaggcaaaatgatacagggttggttggctttacaaggtacgcttacattcggtggatgactaactccctctggagttggcaaatttacacttcgcctagagcatatgcaacgacaaataaccctggcaaagtattcaatgtgagtactaagcggtatacccagcgtgaagcttctgacatttggcggatcatactgaaccttctcacgattgctgaagactactcatttggtttggctcctccaatcactactagccacgtccctccaaccaaaggggcataccagcttactaaggttctggtgtcgaggaatagagtggctgtgagctcgacggtggaacgctccgtcgtggaagtattatatcctggcgacaccgctctcgatatggatcaagtgcaacatgtctctgaacttgcaggctcacggcaagtaaatacagaacgacgaactactgtcattgtctctccttctgagtatttgatggatacgggaaaggttacggggaaaggttacggtagctatttcatctgtcggtggtgaagtgctgcttgcgcacgctcgttatgttggaatgccgcgtaactgttgggctgttcgtctcgacacgtatgagtgtgtctgcgcttactacaagaatttttttgtcatcgcacgccctatggaatgagtgtatccggggttcatggataccatctaaaggtaaagtaccgtcgtgtttgatagaagaaccaccctcaaacccgcaatcgaactactggatgtccgaccataagccgagttcaactggaattgttacgacgtattgatcgccttccaccgcccgctcaacagggtgtgatacctccgaaagaatcgaaaatgcaacagtcgatcaaggtaagacttcatatttaacgtggaatggttacatgagcgaagacatgggctatcaacctagcaccttcggcaaaagtgatgttggattcgacttcattcttgttgcagcctaccaggggataataccagtttcacctgccgtcacgaacgtggaaacacctcccaggaatgacggttacttactgtcaccggagccggtgccatacggtttttattcatatcggtgcaccaccccaatgccatcccaaacgtagcagcagcaaggattatatgcgccgtctattggagacacgtatgccctcgctccgtatgttctacttaggcgtccgtacggacgtactgctttagcgttgccggtgccagctatcgatcttttgtaggagtagatgcatgaagtaaatacagctttggagcattattgttcaaccatatctggaatcgaactcctgtcataagtgatactacgctcaggagtgaattgaatatctatcactgtatcaagtcaagcaacacctgcgttgtagccgagcaacaagtaatcacgtcctcgttaactgctatatcgaccggttcttagtatatgggcatccgggtggtaatgcgttcaagtctgccgaaattagagcggaagtccatatattgtgcctaatacgacccgcgatgcgcactaggggcttgcctttagttagtagttcagttagcgtttctgaacgttgtagagtcgacgcgccgcgctgtagtgtaagcccatattgagaaaggcttactctcggatcaattcgtacagaacccaaacgtgatctctcttcatttttctggcacgacacacccaaaggcggcggttcccaggtagggttagatatacatagcttctgtaagtccagcttctcgtgcgaacacattatgactcatgatattttaatcgatattgttgtcggtgtgctgcaaacgcttctgctggtcgtggggaccgttcctgggatccgaaggtgtatatgccgccacccattcaacaatatccgtagccgtgtcataacagtaatgcattactaactactgacccacttattatcatcagtagctggcatctctgtaagaagaacactgacgctgtggcctgatttcgcttacggcaatctgagcagtaggtcactttattgtgtacaacgtccaatcactacgagtcaacaaaaaaagcatcctaaccgcggttgcacccatcagggttagtcacgaatgagtggttcattcggcttttagttcgaaggattctgggtgccccctccctgctatcccccacctttctttgcactctacaagcgctacgggctcggaaatgatggtcgcagagcaatgggtgaagatacaacgctggaagagccatccggaatggaagacgaaatacttcatgcttattcttaaggtgcaaaaagccaccctgctcactagtattggaacatggtcgccacctcgatgtggaagccgatatcgctcgcatggaggtgagtgaagaatgcaacgaatgtctccatatgttaaagcggtcttggtgtattataaggcgcgcatggtaggtcatggtcctatggcgtttaaggagttgcatacttactgtcgtaccaaacctaagttcatggaactgaacaagaacacccagcgcacgcgtgctaacgagtacgcaatcagagcggcgtcagcagaaggtggaagagctcgatccatcgtcagtgttgaaatgaacagtttacacagagtaggtagctcactacaatgtattacgcttttggttgtcctatattcctacgcctactactctatatccgttctcggtacctggaggcaaaagaggaagtgagctcgtcttcggactgcgtcctcgactcctcgctcctcggcctcgtgtcgtcatcgcactatgtatggttggcaggcagctctctgcctgcactatccagaccgcagctggcgatctgaacttctctcgtacttgctaaaacaataataacttgtttgagagggtttgctttcagttacaaaataactcgactggcagacaggagaagcctgctgcgacatgatcgtcagatcatcgacatagaccacgactatgatccaatctactcccactttttgcacgtagatgcaaacctctttgtggcagcgtgcaaaacccatcgacgtcaaaaaggtatgtaggactttataccagatgcgcggggcttgtttcaggccatagatgctcttcagaagctcacagaccaagtgcgctatgcctcgcttcgcaaaaccgtaaggttgcctcatgtagatcttttgctctccttccatcgtgccgttcaaaaacgccgtatggacatccatctggtggatatgacagtccaatatcgtccctatcgccagcacaaggcgcagtgactcaaacgggtgcgtatacctcatcacagtctactccaaactcctggtggttgccctgtgctacgaggcgtgctttgaaccgctcaacagtcccgtcggcgttatactttactactagtacccagtgacatggcaaagccttacgaccgggtggcagttttacgagtctccacgtcccattctcgatcaaggagtcgtactcaagttccagagcttgtttccattgctctctatgaggtccacttaatgctgctttgagcgaccgtggtgtcggcatagtatgtcctgcgcaatgttcttttctaacatcgcctggaagcacagatagtgcgcgtatctcttcggcttcttcgcctctacgtgggcggggttcgcgcctctgtggcgtatctacgagtctcccacgttggcgtttcttttgagctcccactgctgggttactggctttagtagctgcttcagctctcactgcctcagtagacccctgtgctcgtgattcagctcccactgctgccgtggacccatcggcaagagcttcagctcccactgcctccgtagactcggtcgctagtgtttggtttccctctgctgcgggtggctcgcgcgcagcagattcaattgtgagggcctcttcggcctgatcgaaagctcgctgaactatggtggctacattggtcgtatcaaacagcacatcacgcgataagatgtgcttgttgttgtacatgtcccagcgtctataacccttcgtttgctcagacattccgagagaccggcactttacggcgcgagcagacagctttttgtcctttcttaaggcggcaggcacatgcgcaaagcatacacatccccacacaggtagcttgctcacgtttggtggctccccatacaccatctcatacggtgtcttgtttcccaaacgtgccatgggtgtgcgattctgcacataagtcatgtacatgagcgcctctggccaccacctgtgttccatagctgcatccttcaacgcgaaacgaactctatccagtttgctctggtggtctcgctctgcagctccgttttcttcggggctataggcgtcggatgtctgggatacgatgcctttgcctttacagaagcttttaaaggctgcattcacacccttggtgcctccgtcggaccggatccgacgaatcgtgaactttccctcacgctcaagctgcaaacgtagctcctctactttctcaaaaacttctttcttactgcgtaggacgtaggtccagcgccacgacgtgatgtcgtcaatgatactcaggaagtatttgattttcccgcagctgccatacactcctatagttttcatggggccgtttgtgtccatatgaagggtgctgatggggttctcacctctagagcccttcgcatttcggtaggatattctcctcttcttcatctctgcacaagttgtgcaaaagaatgggatctttcttagacctggcgcggaaaattttggcattccagccaccacttttgtgctcaacattgcaattaatgcctccttattaaggtggtccagcttaacatgccactcctgcagtgtgcgctctaacctctcagtacctaggcgagctagtggtttacagggctcctgtgtcactgcgttgcacagcagttgacgctattgcagtgttttattctgtatattgtatgccctgttaattgctattgcaaccaacactaattcattggcaaagaacacaaatttgtactcgccagttagggaaccaaacatctggtacccaccacgcctgagccagaactcgctcagaatgttcgaggtagcttccggtactaacgcaatattttcgaacataaaaggtctaattccttgtggaccatgcaaatacaattttatcgtgctaagatgtatatttgaatgcttagagccctgtgcgaatgtaaacatgtaggctccttctgcacaaaccgcgctgcctcgctggttagtccatgcccgcaccctgagtaaagtacccaagaatttgtggttagatacgaatgatcgtctaacagaaatggatacaaactttgcacctttttctcgaggtcagtcagcatgctggcgaagcttttcgtcgcctcggtaatctcttgattgctgtcctcgcttggctgtccttccatgtccacgtcgtcgtccgattgcttagcggcggctggagccgtgcccgaggcgtcagctttcacggcgttgacgacgctctccattggctcgtcttcgtcgctcatcagcgaagcgccctttcccggtgtgtcaggctgctgaaagttccttgggggcaggctcgtgtacccacccatccggggtcgcgggcagcgaatcttgctgcgcgtcgcacgcgtctaccgacacgactttggccaggcactcagccaatgggatttcacgacgctccttggccttgccctttccattgcccttcatcttgggcgtaggctcgtgcacttccttgcgagccttgcggcttgggtacgtccacacgttgcggcgaaacacacacgcagccctgtatgcgcgacgcgcggggcagtcaagcatcttgtgtgggccaatgccatcccgatcgttttgcgcgcctgcgcagtagtggcatttcatgtacccgacgttgtagtggacgtcgttgatcggaccgtctgcggcctttcgcttgcccagaacggaaccctttggatttgcaggagccaccttgacaggtgccgacttgacgtggttgacaggcttgccactggctagagctctaatctcgctcttggttttgttaccgaagatgttggtgagcttctcgctcaccttccccagcgtgaagctctcttccgtgaacttgacggaggagccccacatgtgcctcggaagcacaccgagcatcatgaccagcatcatcttcgacgtgatcatgtgcgtgtgcagagcctcgtgcgcgttcacattgacctggctgcgcacgttgttgaggtcttgaaggagctggccaacgctcttcaagtcggcgttcaccatctccaggaactgctgcaccagcccgacgacgcctgccgcgttgctgaggctgtactgcttctcaacaactcgccaaatcacatggaccggctcgtccatttgcttggtcgcgattcccttgaagccgcccggcagcgtttcacacagcagccgcttgatgtacgacgactgctgattcagcagcgtctcgtgcaaatcgtgctgccatgtcgcgtctttgtccgccgcgggcgggcgtggatgcagctccggctggctctcgagcagatcctcgaagcgcgccagcggctttgcacgattgcgctgcagctcctcgagtgcgtgttgctcactcagcgccctgaggtagatgatcagcttgctcttccacgcagcgaagtgcagggacttcccgttgaacttcagcgagtcgaccgacgacttgtcaacctggggcttgctcattctacttgaaatgttgaaatgaacagtttacacagagtaggtagctcactacaatgtattacgcttttggttatcctctattcctatgcctactactctagatccgtgctcggtacctggcaaaagaggaagtgagctcgtcttcggactgcgtcctcgactcctcactcctcggcctcgtgtcgtcatcgcactatgtatggttggcaggcagctctctgcctacactatccagaccgcagctggcgatctgaacttctctcgtacttgctaaaacaataataacttgtttgagagggtttgctttcagttgcaaaataactcgactggcagacaggcgagcgaggcgcgctcggcgcacctcttcattcaacagtcatgctatgacggaggaggcctgtcaatcagtagcggaggacaccgctttgtcagtggagaagatcagccaatgggcggtggagaaaacaccggaggggatgggtcaatcggtagtggtgatggtggatagccattcagcatcaggcgtgatagaccagtcaggtttgaagggcgacggcttgggaaggaggagggcgacgacgacgaagaagaaaccgaagaagagtccgtagaagatgaatatattggggggtcccgatctaacgcttaggtctatggagatgattctggcaagcgcacctacttatgcgacggaaggcttcattagaagttttcgccgatttgctttggtctaccgctttgaccaaaggcagaagcggccctgatgaatcgtttgccgagtggagcagtcgagacgccggatcacatatccacaatttgccctggccagtcgtccgcctctgtgaggctaaggtttcgtctctacaacggcggacaaatgatttggggaagcgaaatatggcactggatattgagggcgtcggaattcttgtggcgacttctcttatcacgatgaagatgttgcataaggctgccaaagcctcggacacaatctagcccacgcttttatggtattagtgggctttaacatcttgctaacacgttgtctataaacgttttagatggagcaccttgaccttgcaggtaagtgtttgattagagctgcgaccgtaaatctgctgctgggaaacttggttggacagcggatggatgttatgtacgtctaaaattctagcctcaacgtcgtcgttgccggggggatattctacgcacctaaaacttttttctatggtcttatgacgaaaacaattctccttcctgtcaaatgtgatgcaatcgctgatgtgacatcggtatcaagctgccgtgttatccacgactccatgggttcatgctgtttgaagttggttcgcgaccttgcccaggacatcttgcttgatcttttatcaccgccagagtccaaatgaagataccatatacgctcacgagtcgggtattggcctttaaacagatagttacaactgcggtgttttgtgcaggcggagtttgtagtttcccgaggcttaggatcgcccggaaagttaagcaaaggaggcctacaatacttgcgctacagacatactcaagtgcttgtagtacacgtatacttcttccagccgttaatcctctctctctgcgatagcgcgcgaaacgtcaggatgccccaagctatgttcacgtacccttagttcttctatgtgccttttctcgagctgaaataatcagtttatcaattatacacccttaaacctgcagccgaaatcaacgcacccgtgaaaatacttgtgtgattgctcacgcaaatattctataaatgtataccacgccttgtataaatgttttcataatttgcaaatagtcaaagttttacttgaaacctgcatacattttttcccgtgcgaatgtgtaagacattttgcttttgtctattgaatccctcgatgaactgtacccccgtggtagatcgccaaatgggccagttcttcaaggaagtcccttcgtgtccaatcgattgtcatcggtctaaaaacaggaaagagtcggactttatacaatctgattggataaattagagctcgggggtacagctcattgaggacgacccttcacaagttacccatcactttatatagcaagcccatgcgggggggggggggtacagctcatcgaggaattcggtgcttcacaaaataaatgcgtaacaaactgactgcagtttcaagaccttgccggattgttttttattttaatttagtggaaatcccaaattacgtccgtaattttgaactaattccaaaatgcatccgtctgagtatttaatggggaagtgcactaataaggtaattcagcaggcgcgttttgcgacattaggccagggaggcttcgaggagcagggagacctcgaacatcgactcgcattcaatacagtaccgtgacaagcattcagtcggttcggaccgcacaaacgctctgtaagaacgtacacagtaaggtggccaagatacattttgtatacatgatacaaaagatgtacatggtacaatatagtgtcaatgcagtaagtgagcacaaccactagctgtggactgtgtagcatagtcactttccgtactgggagcgcataaaaatgaaaactctactgggcaaaatcataatcgggcttctaatttgctgcgaatcaacgaagtcttcatcccttttatattcgcgaaggagatgatcgtctaaaacgctacgtgagcaaatcgtcggcaaggcataattggtatacatcgcttctattgtggtgaccactgttttcggcgtgtgtgtttggaaattagttcaaactacggacgtatttgggacttcccaataatttacgtttctccaataggaatgcagtattgtgcaaaaacatgacacaaaaactgtagtttaaggaaaaactcagggcgttttaatgttaagataagtgtagtttcaaaagctcaatcagcatttattttgttaagtatggtaaaatcgtttgatattccgcaaacaactaacatagctatccatttttcccaacctatttgttaaaacgcgtctaaaacagttacaggagcctgtatgcgcgaacaagtagtccaaacactgatacgtcattttttgtgctattcatgacggcgtttatatatatataatttagtgcacggtgtgcgagatttaggtaccaaaatacatcatccgaaacgatgaaaataagactagatactttaacaaaacctcaatatattgagttaacccaagatccgtaagcgcaacttgttctgaactacgaaaacggaggtgttgcgcgaagggggggggggcagaaacagctttttggccgacattttgtttaccgacatatggtcgacagccataatatttcgcaaaatggttcacctgtttgaccgaaccatttcagaaatggtcaaccctttttcggtacgaactccagcaaactcgggtgggcaacaccagaagtgtcggctacctttctgttgtaggcctccaaaggattatttgtcctattgacaatctcgatatggtgtcgatcattcccgagacattccaacacgctagttcatacagctcgcaccacgttgatacgaagtactcccaaaacaagtcccatttggctttgcgctcggcctcaacaggctttccaatcaatccgtaaagctttttcattacgtgaggggtccctttctcgtaaagcgtttttgcaggcacgactgtgagcaaattgagtattgcacgagtcatggcctcctttatctcttccttcgcaggcctccctaactatgggaaattccctgatttctgaaaataagctaattgagggatgaccgggcattttaggtatggtgagggatggttttacgtatagtaaactcaagatagtatatagtgacccatagtattgactattctacatcagagttccgaatcgcaatgatgccggaaactcattgcgaacctatatccattgcgttcttcgagctctatcgtggcagtattaaaaacaaactgtctcgagtgtcttactaaaacgatttagcgtctgaaagcgatgtctaggacacttttccccggcttgtcatactatccgtgtattttagcgcggcaagaatcgggtcttaggttaacttttgtcgttattatatcggaatggactgcgtgactctagttcttggatttaaactcgtagatgcaacttccagagggcatatgatttggagacccccggtctcatctgagatgcactggaagttgcccataatggacgagctgaaacgagtctgaggcttgtagctagtataagcttcagagtgctcataagccgcatcttggcgctataattccgtgttggggcgatgatattccacagcaacgtgcagaacaggggtaaaactcagattttcatatatttttgcgagggatgagcggacgccttaatataggtattgtgagggaaatcgagcctatttccctccattagggtggcctgcttccttcgggatgcgcaggtcgatcatttttacgcggatggcttgcttgcagtggaaaagacagccgactatgtgcgtgctctccaacagatctcgtacacctagatgaagtgcctgcgcgaagtcgcaaaccacgccttcaagccaacacattatgtcggtctggatcttgacccactgaaacgcgttccagtacgatcagtggtctttagcgtcgaccagtcggtagcagcagggggtgtacaaaccatggactttgccgtaagtcattacgatgatggtctgtgagaagggtttcggcgtggtgatgaaggttgcgtcggatattacatcaatcggatcagatcggggtgaccaaaaccaaccaagcggcttaccataccctcaatgggatccgcgagattcacttgcaggaattcgcgcgggggggataaagatctgccggatttcttaagtttcaatggctcggaagacatctcctccattggcgtcgttgcggcagcgcttgactataccgatccctttggacttggctaatattttaagccctgcgcccttctcgtgctccctaacgatctcgtccttcacgttgcgccaaacacgagtagggacgactcgcaaatctccgagactgcgtacttctaaaagctgccgcatctcgtattgcacatcccgtacgatgatacggtcatcgttgatgcagatgtgttcacccttgatttgaacaaagtcatcaccagtggcgataatacgagctttgcacttgatctttctgcggacgtacaggcaataactcacaaagctggtacactgaataatattcaatatattaagcttcctcggacattaaaaaccggcatagttttcattggacaaaaaaatcatttgtacgaaaaataagaaaatattcatgtgttgtgtaaaaagaagatactattatcagatcaatacctcaggatacctagcaattgctttctcaaagctacgaattacggtggtttccgctatttcttcccaggccgcaattgtagactcaattgcacggaggtgcttttgcttggcagtgctcctgtaacaccccgaaacttcgaccgaattttgtttttagtgggccaatcacgccaatgtcgagcggtcgacaagccgcggaaaatgcaccactgcagcatttgcttcttcgaaaacgacccgctgtccctcctccgaaacatgtgaattaaaattatcaaggagacattttttctagcgaccgctgacggtgctgagggcttttttggctgtccatgtagcttgcacaccaatcaggctctagtagccacacgtagtcgatcattgcatgtgttaataggaactaaacaaaccgcaacaacccgtattaactagtaaaagcacatactagaatgctaaactgacattttcagaagacatgtctgtgtttttttcctactaatgccggcgttttgagcctgccgtctttgtaagtcgttgtctgtagtacttggcatgtttgtgagagctcctgtagtagtagtagtggtccccgtattgcatgatggacgagatggagagatgaataactgcatcaaagctgagggcgtagagctgtgtggcgaatattcactgggcaacgaattcgaaagtggggaacgaagtatatgcattttattgtcgtgtgtaaaagtagataatgctgtggggtatcataagaacgtaagtaccacggaattattatcctaagaatccagaacgaggcatatgtaaccaataattaccctaagaatagtgcaatatgaatctatagtatttatcttgggttcctgttttaggcacatttttgggcatcagcaacccttctttacgataaaacgtagaaagttacttcaaacgtttaggcacttttagccacttgaggcatttctttaggcacgcataaacttctcccgatgaccgcctgcagctagatgagtgtgatttcggccttgacgacgacggagagtcaagtcaaagagtgccatggaccccgatatggcgttcaacggggcagaacgcgctggtagtgtaccgcgacgagctaccgagacatgcagtcgatagaagcaatcaagtcaactgtactatcagccattttaaatgatcgtgactacaatctacgtcggcaggaacatccgatgaggtatcaattggtaccgtgtcgctccaatcattgcaaggtagaacaaaaacgggtacattgtggcagtgcaggaaactctgcctcgcttccagtacacgcgagatgtttcagcaaggcaaccacatgatgaacacaaacaaccctccaacccctgtcgagcgcatgctaaccaaacaaataaagaactatattgtggagcgcttaggttctggagaaaaatctacagctgcaaggctttacacacttcttggcatgctcgtggatgatcggtgaaaaagcaggtccagtcccccaacagagccaaggtaccgactttgtgaagaattggcgacgtaaaacccccaagaatagtatgacgctactcatttcgctacgcgatggccacctctacgaccaacaaaatttgggggagttaccagacaccaaaatggtgattctgtgcgattctcagctggccaccgcacccgggaaaatggggtggtctcccatatgggcgatggctataaatcgtatccactgagaatcggaatgtcctgtctacgtctcactagagagtacatcgctgttcaaaattttggcgactgcacgacgatctttcacatcgacaatatgcatagtatggtcatcaacagatacgtggttttcgcgttcggttattcggatcagactggcaaattttaccattgtgtgcttttgcacgtctcaaacacgtgcaattgatatcgggtggtatgaggcgaggcgggtgaacgccttttccgcccaggtgtatagtgtgcgaatgttccgggagaacaaagtctcttagaactgctcaggcggatacaccataagatgtccgcccgagatggcgtgcgttccttgtgacaatccctctcgggtcgtttgtcttcgaaccaaggagctcggccgtgttggtgagttgttgtacgctgttcggtttctgagcgggatgcgatacgcactttcaaacgtagcccctacgactctggacgataaccacaaatacagagttatacacaaatacaaatatccgtcacttattcatttggaccctcggacggtgggtcactactccagccaactaacgagtcgtatccagggtactggtcaaccgtgggcgacttcaaacgcgcaccactcccaaataaactgagataaataaccaatatcaataccctaccacacaataggcttccagccaagtcccaagcggcgctattcactccgcccgagatgtaatcgataatatgaaatgcagggcctcgctctgggcgagaatacggctgcaactaggaaatgaaataggcggatcaccctgagacgcctgtacgccccagtccccttacctaacttggcgtacttacttcagggagagatccaaccacggtcgtacctagccgcggtgcccgatcgtcctgcgcttcctgctcttcctggcggcttgtgggtcttaggggaaaacaaactctgtttatcttttactctgtggctatcttcctgcaacttagacatgcattctgcttatcacttgatttcactataccgcggttgacgtcgacatcccggccgagccaaaatccagtgtagagtcgtgggtacaaatcacctccttcaacgttccacggaatctttgcccatccttggtcggtctgcctggtcggtcggaaacatcttgacttgagtataccttaatcgtatctccccgacttagacccgaccagagtcgcaaatgagttagcgactgggccagggtcgctggtcgatatgcatcctgggcgagtcttcgccgggtccgagacccttgtacttgtcccgcaaactacattgtccgggcgcaccatttcagccaatcagcgtgcgcccagacgaaaacccaattttccatcgtgtcaggtacatccgaattgtaaagcgcgtgtgtttggaagtgtgtgggctttgatttgatcctgactttgtaatgatggatgcagacaaaggggttatgaacgtggatcggctgtgcgcaaacttacggaccatgttacaatagtgtggattaacctgcattgtttttttctcgctggcaagcattctacacgcctagtggctacaccgctaagaataaccctttggagcaatatcatagaacagtgaggttgcagtgccctccccaggagtgaacccctagcgagctactcaagaatttgaatggcgctcgactcgcttttctcaacagcgacgccgagttctccactgcgggcaccgcatcggatcgcttgatggctatgcaccggttcgcacaccaccgaggatgcctctcggtgcaccggattccgccagttggtatcgtttctgctaatctttactgagtaaaacagaagccgctacgtctaatagctggggagaaaaagttggtagcaaactctttccgatatgatgtaaacggaaagcatgccgtccggtggctagattgtagttacacgaagcaagtcttgctcatgcgcgtatagcccgaagcacgcgctttgctgtcatgtcgttgtagcttgtattcgcgtcggtgcatcgggtcctggtgtaagcatgcatacccgacaattcgtgcgccctaactacacgcacgatgattcctctgtcgcatctttgggtgcttcacatggctcaccgttggacgacgaccttgtggattcggtgcaaaggaccagtcaaaatccaccgacaaacagatgagagccagctaccccggtctctctcaaatacccggcatcacccccagcaggccagacagggagcattgcctccacagtcagttttccttcgaccttgcttctcgacggcgaaggtgaacttttgccggcacagcgtacggaacccccgcgcacagaaggccgagcgaatgtaacggcggggttattgacacgatgggatcggagattatctggattccctccgagccccacctgtgattgggtagttcaatctgggagagggtgacagcgacacgtagcatatgggagaagcggatcccggccagactcgcgtttgcagtatacaaggttttgtgaccccggctacagccaagtaccgaacgagaagcaaagactaagggagcgtagaagtgcctccgactaaaggccgcatgctcttggtgcactgtacaacgcaaaaggagcctgaccggatcaagtgaagacccagaagtcgtgaagctgtccaaggcatcccggatgtgaagcacaagtggagtgtgatcccaattgaagataaatttgaatcccggatggagataccaagagaccatctcagatgtgaagatccaccatacaaatcccttggtgtttccgaccgaccaagccaaccagccaagatctgttcggattccgtggaacattgaacttcgcttgcgtacccagtcatgattatacttgctggaagtatacaacgagggagtgcgggagattgcgacgacaagaccatagtgaagacaagtcaagatggggtggattcaaagatcaacagaagatacagagagagagagggacaacatataacaggtatacatagttcgttttgccaaggatcgcgcaagtgagttggagcagcctaccgcacgtgcatccccggaggaccgactaagtctacgtgtgagggtccagcaactgtgacatctgggtcgagctcccgcaaccaagaccagtccaagttggggtgagtaccggcgacaacctgaggttgatccatcccatttcatttcctaattgcggttgagctaatccaaaccaggaaggccccgcaattcatattactgattacctttcaccccggttggagtagccccgggcgggaagtattgacttaagaactattgtgtgataggaggtaattgattgtgctagtttctctgcgtattttggggtggtgcgcgtgagctaaagccgaccgggattgaccagtgtcctgggggcggctgtagttgactggagtagtgaccggtcctttcacggtccaaaagaataaggaagggctacgtgcttgtatataactctgtatctgtttgtattgttagattatctgaggctgtcagaggtaaggttacgttctgccctgcaagctacaggtatcaagacaactcatccatggttgaaggctcctggttacgaagccaaacgaacacacagggattgttcacaaggatacacgccatcccggttggagtgtgcatctaggtgtattatcttcggctagggtttgttctgggtgcactcccttcgggagtctacatccagggcccgctaactatgcacctgggtggttaggcgttcacccgcctcagtgtagcgtatggtgtccgagaacaaggaaccccgagagaacgtagcggtggcagtgcttccatcccagtgaacggaacttcggcaggacccagcaacagtaccgtcaggtacccaagccgtgcctaatcggcgctcatcgcgaaacagaaagccaattaaccgtgctatcgagtctcgacaacaatgccacaagcgcagtagacgttaaggctagatggtaggtatcatttttaccttagcttatgtcgccttgtattaatcacttttcttaaggtttcgttgcctgcagactttcacttaagaaccctccgcaatgcctaaaagtttagcgctgcatgcgttcgatgcgaaggcgtacccaagccgctgctgggagccgtgtgagagaaggtatcgcaagctgcggtatccatccgccaaagacttcaacacggcgcccagccatattgctaacttggcctgcgcttcaacgctctccagcttcaatacgtacgtatcctccgttattcgggtaaacgcgctcagctactcgggcatattcaggttcatcccgtcgctcgtgtactcgctgaaggcgcggatccgtagcggtttccaggccccgttcgccaacgtctcactcaacttggtattatcgagcatcctggtggagcggcccgtgattatcggcagtaagcagcaccccatgtgggccaacggcgacttccaggagtagatcgaaatgttgaccaaggcgttcatcgatgccatgatccaggatggcggcaacgggtccatcttcatcttcagccccaccaccaccaccaccatcccgacgtacaaccagttcaaggcctgcaattagaagctttaacgctgctattcctcagaaacctgagattagcatttgaatcgaatgcagattttttggaaaacattcggatctatgctttgcttttgatcagttacgcaaccttttagccaatcatgttttttttctgtgccggattttgtattacactccttaactatgaacgaaggttgtcagtcacgccggattttcgtcgttctttgtatacagatagattccgtggagctaagcctaacacatgaagtatgggtttgcttcagtagaaaagcgatccgttgtaaggggggtaacgaaattattattttttattttttgtcgtgttagtgctttcgtacgaccagttgcaataaagccataatttccggtactgatgtggccgcatacttgctgccttgaccggaatggacccaacataccaattcgcgcatctttaggattttccaggaataattgccgagcacatttgactggaaaaaatggttggatgccgctcacaacaaaattccccggcgcggtggaacgaacccaatgtcgcggggttaggtcgctcatttccgattttatttcttcggccggcctaagcgcgctgcctgcctaccgatgttgtggaggtttcctgtcgccgcgggcagctgtcggaagaggtgtctacactgggcacgtgtgtctggaaagttggagggcggtgccgcggcagtttaaggggactggcgtgcgaagtctgtgtgacggtactattggtgccctagtgttgtggcaactatcgtcgattggctattgtctacggcgtagtgttatgaacgctgaatgaagagaaagtgcatctgaattatactctacattaaaaacaaccgaccgtcgcgtcgttatattgcctcgttctggaacgacgactacgtcataggtagcatcacgacagaattgggtgatgctgtgctggctgcgatcgaggggctaacctgcgaactaatattccgtgaggttcattcggaggacggtggccttcaagctgatatcatgaactcatcagctagagagctttgccgccaatgacagctggcgacaagagatcggcaatgcagcacttgctgctgtgtcgctgtcaaacagacaggcccaagctgtacataaaaatatatcgattgcgttaatggacgacacttctctacatgtatacctggatcattttggtgctgaagcggagatgcacgcccgccgcatgcttcgcttccaccgcggcgacattgtacagtatagaggcgacctggctcaccagaggcataccgaacttccggtcgcatggatggagttggtcgtgcagccaacactacaaagcggtggcgtttcgaacacatctatcagagcggtgcacagctcctacgtattcggctgtcgatctaaaagagcacaggcgcgaatacttacccggaagctacaactgtacatgctaggtaccgcgcttaaccataggaatatgactattggtatggtccaatctgcgtgataattgtgtcactaagccatatttgtctgcttgtatgtgagcccgggtattgcggtctggctgatagcgggaggcatcgccttcaaagtatctctaatgacttcggtaatgtagcttgcaatatttggtcgcttcttctcttttttgcggtggttcagcaccgtcgccgtcctcctctaacagttcccccagtacaagacagcttcctcctgggagtacggcttgtttccaggtaaatcagggttagtgaaactcggtgccaacgggaaaaggtactcagacgggtagtcgtaacagatgaacagcaagccaaatgcatgaagcatgcactgctgccgcctatctgaagccttataaatcgacaccccctgtaccactaaaatcttaattctagcaatgtgaaggaacaattcaccagaagctgtcatggataaatgcagtttcttagcgaagcaggtgtcaacagctctacaaaaagtataccacatcatagtgagtagggcggcgtcgtcaataggatttagccccgtagcgacgtctgccgtagccactaggaactccaccagcacacacagctcttgaatagtgcactcaggtgcgtcattagtttgtacgttggcgcgcaagttgcgctcttcaatgtgacttgccattttctcacgaaacttggttctttgtagtcatctagcgatatagtgtagcgctcttggagcatgttcaccacttatgataaataacccaacgctgtagacttggtcagcaaaccagcagcagcacgggccttgtcacttttctttgtctatatgaaaatggaaaaggctgttagaagtgagtacatgttttgcgttgaaggctagcttctttgctatgagctctatgtatgtcgtctatatctactttcgagagctctatggagttaaggaactccgcgaacattttgttctgcgaccgcttcttggcggttcgcgcgggggtatcgagccctcgtgatgccctcctcatggtgacccagaagaagcttaagtgctccatgaaaacgagagcaaagtctatattatctattcgctctgaggctatatctggtacatacttagctatcagataaatggcgctctatccttctttttgtatatcgtattattgataatatgcagaactaccggaaaattccgggcgtaagatagaatgtctttaacctacccctaacaagctgtgattggccaaatagtgtatgcttgccttcgcacatcttgatgttgctgtaacaaggctgctatctcttcgtgcccgaggaatgcgaatttgcattcgcatatagtatctaatcatccaggtggagttagaaacatctgaaaataccattgaaaagcgaagaaagagacaaattcagcgacgaaaagaacgtagaaaaagagctaatattggctccaagacatcaaacaacaggatatggtaatctgaaaaaatacattttttcgtgtgcaacgaaaaggtgcaatggacggttgacatctatttcattggcgaatattatatatacgtgataaaaagacggggaggtcatctcttccaaaagtgcatgttttgcacacatattccgtggattttcatacgctattttagacttgaattttgtatgtaaaaacatgccctaaccaaccgggcacgaagagataacagggtatgggcaggggtcgtctaatggggtattttgtgtagaaaaagacgaaacccccttttaaggttcccagcagtgcccaattccaaggaagcaaaacacaccgcattggaggccaccaaatcgttggagggctgtttcgactgcaggagaactaagaagcgcccgctgtgaaacataatgactaccatcggaaccttgtatacgcttgtgttactatgtggcgtttgcccatggcacacgggcactattaagtggcgtctgctctcgatagatatgcatgcggcaacacggattgttgtcgaaagaagcttgttcacgtaggaaacgaggttatgatgatatcaatggctgcaaccgcctctcggttgtgccaacccgtccccgggcttcaagattccttcatatgctgcagattccttcgtatgttccccgtttagtgtccaaccattttaattcgaacaaagcgacctgcttctcccagttttcgttttaccaagaactgccaaacacaaccatcaatggcgccaaccgccaacggccgccgaaaaggccgagcaaaaggccgctacaaaccggcagcgtcatcggctacagcaaaatcctccagtcatgcaaaagtgcaacgcgtccagcgttctatttacgacatgttgacttcgccttgccccaagactaaaacgctccggcaaaagtggctcccgaaatatgaaaaagagctaggagtgcggccattcagctgtagtggaaccgaagtcatcgaagcactctgcaagttctgcgagtcgtttgggagagaagatgaggaggacaaagcgcagcctagagcgggttttgtggcgaccctgggccagaaaaaacaacgaaagaagcctagcggctggaaaatgttcaagacattccgacgcgaccatataacgaagcatttggagagtcaacacgctgcccaatggaagctttaccagtcgatcgacgatgaggagcaacgcaacagtttcttccaccagaccgtgatcgaccgtttcctcccttcccagccagacttctctttttccgtcccttgcggaatcgcaagtctcattcgccgactgttttgcaatcgcgctgatgagccacacggcttggtaaccgtggatgatgatatcggggaggtggatctgtccaatgattatctggagactgaagctgaggaggctgtccttgtcatccgcgatcgcgaccagttcgagactgttctccattgtgtcaacatgggaattagttttcgtaaaatcgcaaagacgtttcgcacttttggtagagttatcggcaacatgaggctcggtgctccagacccgaaattggtgggcagatacgtccgctgtgtggtcgcactcaatcttgcagcgctgaagctgcttctcaacaaggcatggggttttgcgctcatggtggatggagcgacacacaagaaggaaggctaccttgacatgcgtgtttccttcgggctgaacggggctgtacacaacttccactacttagcaattccaatgggtcatgacgctcatacaggagagaactacgccgaactagtgctcgatgtactggaggatgttggcgggagggggctgcttcgacgacttgttggaatttcaaccgacggagaagctgtcatgcttggacgccaccaaggttttgcgactcgtgttcgggcagcggaacactttggaaactcgtccgtcgtcgtgaactggtgtggaagtcatcagttcaatctggccgtcgacgcatttctaagagtactcgacgagcatgtcaacttccggagccgcctgggagctgagatctctttcacaaggagacacgagagagtgcgtctatccgtgggtttgtgtccgacgtatgcatctacgcggtgggaatcaatccacgatacgtgtcacgttttagtgaaacattacgctcagctcgtacgcctgcaagacgagaaaagttacgcccagtcgagcagcgcttggtggctgtgtctctttgtcgtatccgagcagtcggagcagatacgtgcgtgcttccgcaagttgtagtttaagacggtcacgatgaaagggcagtacaaggcgttaagcgcattcgtgcgcttcttgcaactgaaatttgagagtgaatctgacgatcgagtgccaagagtcgattacaagaaggttgccactcatctgaagtggtgctcgttcccgtcaaagcgactttttgaaagcttgtagtctggtgagcagtatgctgacggtgaggggctgccctacggagatgatgaatcggagtctggcgaagggcagcgtggatcggatgagcacgacaatgtagacgaagaaggtggtggggacgaggatggcgatgccgagcctaatgggcttgatgaagatctacacgtgtgcactcggtcaagctgtcgctgctgcaattgttgtgctgattgagagaacctcccgcatcaaactggacatcagcagggacactcgcgaggagcctccgacctacccaatcgatatggtgacctgcagcgacactaagttcaatgctcttctggagtcccatgagagcaagctaaacgaacattttggcgaggcaacgacgcaagagatctgggctcagcgaaagaagctaatccacatctacaagacgaaaacagacgtccgcagaagcattgacgatgcttcggacgaaccatttggagacgcgtgggggaaggttctcgtcctcgacagattcaatgtcttgaacgcatttgctgatgggctagccagcatttcgccagggacccataccgttgaaggagacttcagcacgctaaagagaacaaaggggccacaccgtccaacgctcagcaattacgccattgaaggggagttgcaggcaaggcagtatttcgatctcatcgatctggcgaactctgttgatcagaacgaggatgatgcggtgattgcataggcaatttcgtacgtcagcgccacgtacatcgtccacttaggccgcgtatggttggcatgcatattacatggtcaagcgaatacccctttgtaggttttcagtgatttcaatacattcctgttgattctgcccatttaaagctctctcagactacccattttacttgaaaggggtacggttctcaaaatgcccaattagccgacccctgggtatgggcctccgtacaaaatagacttatcatacagtaattacgattttcagttaccagaaaagccaaatgatttttttgttttgtgggcgcctactgtctttttttgttgttgtattgttctcggactcacttttggtgcttttgttaaccccagtcgggcactttgctaggacaaaccgaaaaaatgctagacaaatccgaaattcacggaagtaaagtatagtgtacttaagtaccataatccgtccgtctaggacaaaatttgtggtacattttactgaaatcaagtaaataccgattttgtcctcccgtttgtcctagcaagaggggcgactggggttaggggggttgctcctacgtataaagaagagcttgcaaattatcctcgcttcggtaacagacgtgaatgctagctcagtggttctggtcctgatgtcatttttcattgcgacgatctttcctttttcatctacagtacccatttttactagtggtacactgtacctcaccctattgttgtgaatccaaaagtaccttctatttctaatgcaattaaaagtcaaggtattgcaggtcatcgtctaccacagatcacttcgcacctacatctatccaaacactacctacgcttcgacagccattcatcgcaatagccgcgtcttaacaccacttgtggggagataagtccggagcatgtgtatccgctacgttccgccatactgaaatgaagctgcagccactcggccaaggccttgcaccgagcccttgcagtgcagggccatcatcacgccggtcattcgtcgatcgaagcccgacgccgcataccggtaccgcaccgccttgggattgcattcaggcgctctctattcctgtcgaatcgcgggctaaaatgagctccacggccttactaacggcgtcaacgtccccgccgccgtcgcgcgaaccggaatacgctgcgctggactcgctcgagactccgctgtcccatgccatcgacatgggcgtcaaaatctcggcctccgaggcggaggcggctgcggccggcgcctacgtgacggcctcgtcgtcctgcggggcgtccaccgcccgcatcaagcagaaccccttcacgtacacgacgcccgtggacacgtacgagaagtgcaagatgacggtgctgtgcctcctgggcgtgccgttgctgcgcgtcgtgctgctgctctgcgtgggcattctactcaccatcgtgagccacttggcgctcatcgggtacaagccgctggacgcgcacacgggagcgaggccgccgctgccgcattggcggcgcgtggtgggcgcccccgtgtccattctactgcgcgcgctcatgtttctcgtcgggtactactggatccccgtcaagtacccgcccaacttcgaccggcgcaccatgccgcgcgtgatcgtgagcaaccacttgacgttcttcgacggcctctacatcttcacgctgctgtcgcccagcatcgccatgaagacggacgtggccaacctgccgctcatcagccgcatcgtgcagatgattcagcccattctcatcgaccgcggcacggcggacggacgcaagcgcgccatgaacgacatcacgtcgcacgtggccgacccgagcaagccgccgctgctggtcttcccggagggcacgacgtcgaaccagcaggcgctgaccaagttcaaggttgggtccttcgtgtcgggcgtcccgtgccagccggtggtgctgcggtatccgtacaagcacttcgacatgagctggccgcccggagtgtccggactctacttggcgctgcgcgtgctgtgtcaagtgtacaaccgaatggaggtggagattctaccggcgtactacccgtcgcagcgcgagcagaacgacccgcagctgtacgcgaacaacgtccgcgatgtgatggcgcaggcgctgggaatacccacgacgaaccatgcgttcgaggacgtggcgatgctgatgcgcgtcggagactacgccaccaagcacgtcgtgccgctcactgacgtaggcgaggtcatctctctcacggcattgaagcgtaacgatgtggacctcctggtcgagtacttccgcgagcacgacctggacaaggacggccaactgtccatggaggagctgcgcaagctcttcccggccgacgacccggtggtcgtcgaccagctctttgacctcgtggacgtggacgacagcggcctcattgacttccgcgagctgtgtttggccctgcgcgcattgaacccgcagagcgtcaacgaaggagccgacgcgctggccaagttcgccttccgcctctacgacctcgacaacaacggactcatcgacgccgccgagctggagcagatgctgcacttccagcgcgacttctacggcgtgcccgagaccagcgtcgctgcggtgctgcgtcaggcgtcacacgctcaggcggagaacggcggcgttggcatcaccttcaagcggtttgagcagctggtggagcaaaaccccgaactgttaggatacgtgcgcaacaagctcgaagtgctgcgtgggtccttgcgcgagagcagcagccaggagattctacctcgtccgtagagagccccatggcagtagctctctctcgccaaatgtaaactaaatgtacagctagctgtcctccggggtagagcaacaaccccgtcgacttcaaaatgcccgatcgtcgtctgcataggtgtgaggcttccatgaacggccggccgctgcgaccaagggtcactcactcgttgctgctgcatatcttggcagtctgcgtcttgataggaatccgatactcccgagatggatcacgcgggtctctactcgatccggcgcagcgaagaccgcgaccagagcggggtgctcgagctggactcgcccagtaaagatgctcgcaggtcgtacttcggtcgagcgctgctcggagccgtcattgagacgtcgttcctggcactgaccgctacagatccgacgaggccggagcgggttctgggcttcgcagccttcgacaactcgccgtcgggtgagctgaacgacgtctcctgctatccagcgttcctcgagaacaagtttgagctcccaccggcctcagcgttcctgttcctgacgtacttcgcccagcgacaagcaactgcaggcgtcgccagtcgcccgccggtgctccgacacctgctgcacacggtgttcgccactctggtgaacaagcgctgcgtgctgctggtgctaccggacgacgtgactatcggcgagaccgagccggcgttggccaagtttttcgagcgggtgccgactcgctcgacgcctctggaggcgcccaaggggtcgttagctgtgatgctggagtggaagcgactcgagcagcagttcgccaagaacgccaagaccttcggccagttcgcagtctaccaagccaaagtcgacgccttctacccctctgtgcacgtgcgtcgggcgagagtggaggatcacgacgacttggatccgatcttgaccgctcaagctgaggcggtgtcctcggccttcggtgaatacttcctcgccgagctcattcatgaccaagacgagcacaacgtctgtctaattgctgaagctgccactactgctaatggagcggtaaatggcagcgctaacgctgcaggacaagggcgagctatagggctgctcgcaatctccgaccaactggacgtttcctcgttgcaagacaacttcgctctggggccgctcaatgacctagccaagagcaacgccaccgcaccgcgagctagtaagatcactccgcccagactcgtgatcgctggaccacccgctggaggcaaaggcactcagtgtgagctgctagtcgaggcgttcaacgtgctgcatctgtcaacgggcgacttactacgagcggctgtagcttgtgggtcccaattaggtctacaagttcagcacttcatggactccgggcagcttgtcccggacgaattgatcgtcgacgtggtgctcgagcggctgggacaaccggactgtgaagctcgaggctggctgttggacggattcccacgtacagcgactcaggctgaggcgttactagccgctggcttctgccctgacgccgtcatcgcgcttgaggttcctgatgacgaagttgttcgacgcattgcgggacgtcgagtggactcggaaacaggcaagacctatcacctggaattcaaccctccgccgcaggacgaagacgtgctcgctcgccttgtgcagcgtagcgatgacacggaagctacaattcgccaccgcctcgctacgtttcaccagcatttaggctctgttctctccaccttcagcattgccccaagtcctggtgcagtagcatcgaaggtggtgtcagtgaacgggctccagtcgaagcacgcagtggcgcagcacattatcgagcaaacccgcgcagtcaagacagcgcagaaggtacgtttactgataaatcgcggtgaacttgccccgccaaacctggtgatctcgggtccacccgcaggcggcaaaggcactcaatgcgagcaacttgtagctctgctgggtgtcgtccatctctcgacgggtgatatcttgcgccaagctatccgcgacaagtctccgctgggtatgcaagctcaaagtttcatggacggcggccagctcgtgccggacgagctgattgtcgacgtggtgctagatcggatcacccaaccggactgcgaaagccgaggatggctactcgatgggttcccacgcacctcgacgcaggctgatgctttattggcagcgcgtggtggcaaagctgctcctgactgtgtactagtactggacgttcctgacgaagaagtcatccgccgcattgcaggacgtcgcgtcgacccagaaactggcaaaacgtatcacgttgagttcaatccgccgcctccagaagtgcaggcgcgcgttatccagcgcagtgatgacaccgaagaaacgctacgaacgcggctgcaagaatttcacgcgcacagcgacggcgtgctggctgcttttgaggcttatcgaggcgagaacggcgctactgtgcagattgttcgtgctgacggcctgcagccagcaactttgatcgcccaggcgtttatcgctccgaccttccagcgtggtgctgaggtggaagctcgcgtcctgcagcgcactggcgctgagagcctctcgaagctgacaagagctgaagcgcactcgaactgcttcgccatcacgctgttctgcgtgggtgacgatgcgttcgagcgctcggcgtctgcggatctcctcgtggctgcgttcgcgacgttcccgaaccgcgactactgcctgctcacgttgcctacgcacgcacgggaacctccgtgcctcgcgttcttctcgcggataacagctcagcctgcaagtgccttcacgcacgcgctctatgtgctgcatcgagacgccatctccttcttctgtccccgcacaagtgacggtcgtagcgtgctccgccccgttcagcttgagattcagcgctttctaccgagcggcggcagtcccaaagaggatgaagcggagttggccccattgacggcagggctcgatcgacctactcgccagtcgctggatcaagagcttgctctggcgaacgaagaagcagaaatcgacttggaagactccccacgacgtgcagtcttccttgtacgtgcaaacggccacgtcgtcggactagcagcgcttgctcgtcaacctgaggtagcgagcttgttgccgcaccacttcgacatcgaccgcgtggcgcgcatggagttccaccgcgcgaaggatttggctttcgttcgtcacctggtcctcaacccgatctttgcgtcttgctcgcgctacgtgctgctcgagttgatgcgtcatttccgcaagacgtgccttatctaccaggtaccgacggggcttggatcgaagacgacaaatctaccagctcaaatatcgtttagtgctgcactcgaggagtttgtgcttgctcctcctcgacgaggtgtccacactagcgcggccaaaacgctgcgatctgctactcgagatactgcaccagacgaagaagtcggcgacgacgtgaaggacgaacgagagcggatacgacgagcttcagtttgcgctgcgttcgcgctgttcgtgctgccgaaacgactgctgtccgagccgaagatgaccatcaaccagcgtgtggtgcttgtgggggcctcggacgcggcgctgagttgcttggctcgacttctggcgactccgtacttgcacttctccaacctcacgctcatttctccgcatggtctgactgtggcgcccatggatgaaggtgaagacgacacaatgacgcctcgagcctcggactttgctcgcaaaagctccttcacagctgtggagcttgaacagtatagcctgcgaactcacgtgcgtgttgtcgagagccgaatggtgcgtgtagaccgtgagactcgagctgtggttcttcaggacggatcgtgtattccgtacgactacttagcgctcaccacgggtctacaggatggtacatgcacagcgcttggacgcctgcctcgattcgtggatgaagacttggtggcagctggaggcaacgtgacaagtgcgacgtactacccacctgtcattccgaagcaaatgatggccttgggcgacttaccgacagctcaaaaacttcacgcagcgctgcagaagacattcactgacgatcaggaacagcctgggagcaatattctggtctacggcaggtcgttgcttgtgttgcaagtgatccaggcgctgcttgttcgcggagttcacgcaagtcgcatccaccatatctcaccagctcgagacaacggaggcggcgtcttcgaagatacagtcgtccgctccgagatggagaagcagtatgccatgaacgggatctcgcttcatgccgccaccaagatcattggtatcgagacagcccctggcaatgtcgatgtactggaaggtgtccgaaccctgtcaactctcgaagacgtcaaaggatctcaccaccctgcgttgcgcagcgatgaaaacgatgccaacgtggtcgaaggagagctggtaccttgcgcgtggctgctctgctgccagcataacgacgccgacgccgacattttccgtgccgtgaacgaaagcgggctggtgtacgacggacgcctcgttgtggacggccacatgcgcacgacggacgcgcacgttctgggggcgggctccttgtgccgcttctcgaggcgctttatcgctgccaaactgcacgagaactacagcagccgcgaaggtggtgagctgctcgctcgctcgctactgcagctcctcgacccgttggcagtctacgaggctccttccgaagtccacccgttgcctgcccaccacgcgcaaccaacaacaaagaccccaatggttccgccgccagaaatggagctccccgtcgtccgctgcgctgtggtcttgggcggcaagcactacgtgcagatcagcgccccggcgctcaccaacacgctggcgcttcaagccttgtccaccaacacggcgtcacgcgggggcaaggaggtgagtctcatcggcagcgaaacgttcgagatggagatggcgtcgcaccactcgcgtcctgccacgggggcgtcctcgtccagccgaccgacgcgctacacgtgcctgctcttcgacgacgtgggggtgctgaatcggctcgaatacttgggcgacggcgccgtgcccgtgcgagacctgcagaacctcgtggggctgcacgaggcgtatctgaacagcgcgctggcctcctacgcagcaggcaaggtgcaggactgggtggcgttcttcgcacacccgtgggcgagcgccctgtaccacgaccgcttcccggcgttccgggccaagcttcggacgttgttggccaaggacgacggcgtgcgcgccattgcggacgacgcggcggcgttcatgagggagacgggggacaccaagggggcgatggcattggcgcaggagcgcgtcggtcgagggggcagcgcgctcgagccgtccacaaggcggttggtggagagccaagtgctcgagttcctgggcagcaaccgagacgtgctcaacatgttcctgctgccgaaaggaggaggaggcggcggtgcgcgacctggcagcaagtgagacggagggctgcatgttgtacttgtgttaatacttgtagttgcatcggagacgttcgtgttgaagcgagcgaacgcccgaaggacgttttgctttagtgtccagaacgtgcggacaacttactgaaagatcaagttgtaggtgggtacaatgctccccacaatgcaacgacaacgaatatcgaatcgaagccgtcgtttttggcacatacggtacatgtacacttgcttgctcgcttgcagttgtttgttacgtgtcttaccagttggcggcgctttgtgttgagcagcggcgcgactacgaattgatacgttgaacgaccgcgtttgaattgcgcgcgctccacttgaacccctttaaatgagccaaagtgtacccctcgacataaaggatctggacgctttcccttctggggagcggagctcggatccctgcgccacacgctccgagggtaccagggctcgctgatctcgcacgtgaggaagccggaagcttctgggatccaccaacagctccgcgagccgtaatacccacgacagacgacagcgcgcttgaccaggaaaaacacgcaaccccaagccaacaaaacgacgcaataatgatttggcctacataacacgcccttatgagttataaacaagttatatgactttcacgaggactactcgtcaggctctcttcacctcagcacaaccatttaccggctcaagatggcgcctatcatgcttccacatcagctaaatgcttgtcaaacatgccagcacccagctaactagagcgatctacctcgcagctcacaactaccgagccaattcacaccatctaccaacctcacacactccatacccaagaccctctcaaaactcagatcctatgttttattcttgcacaaaggtgctgcaacgatggtacaagagctcgaacacggcgcgcccgttcaggtctccattccccaaacgcaatccacagctccgctccgcactccactctagcccctccctccttgacccaagcaggaaagcaggcgcgcccatgctgctcaagatcatccgcgccgaggcgctggcggccgcggacatgaacggcaagagcgacccgttcgtgcgcgtgttctacgacggcaaggaggtggcggcgtcgcaccgcgtcaagcgctcgctcaacccgcgctgggacttcgacgtgaccatcactctggtgcacgccggcccgctggacgtggagctcgaggtcttcgacaaggacgagctgtcgcagaacgacctgctcggcgcgctgcgcgtgcccttcccggagtggcgcgcgctcgtggaggagcaccagcggcgcaagcgccagcgcgccgaggccctcatcgcccaggcccagcagaccgacgcgccgcccgcgcgcgccaaaggctccaagtgcgtggacgtgcgccagatgcacgcgtacagtacaaccgagtcgggctacaactttaacggcagtgacagcaaactgctgcagaggcagaccgccccgcacccgctggatttgcagcggcggtcgcggtcgcttaactctagcggggggtacctccaggcggagaccaagggacgcgcgtccgtggcctccggggagctctcggtggatacctttgacgtggccatggagattaaccccgtgtttatctggtgcaggctcgtgaaaggctcggcggcgcaggggcgcattctgtgcagtattcagtacgaggagagggacttcaagtacctggtgaatcacccgtacggcaccagcatccaggaggtattcttgccgcagaacccccggtttgagcaggcgtactgccacttgccacggagctggcatcccgatgtggcggtgaggcaggacgaactcactgcgatgcacgctggaacccccaaggactgcctctttccgtggcacgagaagctgctgcacatggtggaagaagtcacggttacgtttcacgtgaacgagtcgaaccagggcgtgctggcgacactggtgctgactaactatcgtatttggttcgtgccgtaccggagagtgaggggtttgctgcacgaggacgtgcatacgctgccggtgagcaagatcctgaaggcgtcgattcaacagcagaagcgcagcaacaacaacacgatcacggtgctcattctggacaatatggacgcaggacactaccatgtgacgctctcgccgatttcgcggcttcgggattctgtacgggacttttcacgtgaggcggagctgaagcgtgtcaagacgctgcataatattgtacgggagatcgattggctgcgcattgaaaacagtttttgctctccaacagacctgaatcacaccgtggctactgctgaagagatgcagctagaggacgatctacttcattatacacccaagcacagtagctcgtcgttgcctccacccatggctcgagcgcttacggcaaatttcagcaagtatcagaagcatggatttgcaagtgaagatggaagtggcggaccgatggggcggcccaagttcgggcatcagcacagtgactcatctgcttatcccaagctaccgcacactatgtcggacaagaagttggtctcggatggctatgggcacagatctgtggcagcaagacggcgtattcgctacgacccggaggctgaatttcgtcgacagggcgcatttgaccatcctcgctggcgccggtgcaaactaaatgagcagtaccagctgtgctctacgtatccggcgtttctcatggtacccgagtgtctgaatgatgagatcatcaaggcggctgcgggtttccgcagcaaaaatcgatttccagcgctgacatggattcatcctcgtactggagcacctttatgccgaagcagtcagcccaacactggtgtgcttcgcagcactaacccagaggacaagaagttgatctgggccatccgagacgcagctattccagccgaccaagcagctcgatccaaacacgcgatgcccaagaagaatagtgttgtgcacatcgttgacgcgcgaccagagattaacgcgaagagtaatgctcttgctggaaaagggcacgagtctgtgaagcagtatgatcgcgatgggatgcctatggctgcaatcacgtttatgggaatcgacaatattcatgtggtgcgcaactcgctgtctggtctggcccaggcactttatgaggtggacgattccaactttttcggagctgtgcagaagagtcgttggttggagcacatctgcagtattcttcaaggcgcaagcgaagtagcgacacatctcgagcgtggtgatgctgtacttgttcactgcagcgatggatgggatcgaacggcgcagctttctgcgctggcgcaaatcatgctcgacccctattatcgtaccctaacaggactgtgccagctcgtagaaaaggaatggtgctcatttggacacatgttcgccaggcgctgttcgcacccgacttccgaccaaacctcgccaattttcctgcagtttatcgatgccgtgtaccagcttacgctccagttcccgacacacttccaattcaacgaattgctgctgtccaccgttgctgaagctgtctactcgtcatggtatggcacatttcagaagaactcggaatgtgagcggcggctcttcttgtcgaacgtcgccagcgtcagtgtgtgggatgtcatccgctccaccaccgacaaatttctgaatccattgtatgctggagaggtgcatgcatctgcaggaagcggatcacacatggagccaatgctgcctgtgtgccgtgtgcgcgtcatgcagttgtgggtcagtcagtaccagaaggctatcggacacatgcgactacagcagcgcgaatttgagatgctacagcttattcgacagcaagaagctgatctatcgcgtttgtacgctatcttgaccaatgaacagcagctggagttacgtgcagggcagcttcggtcggacattgcaaagttgtcacgcagcatgaacctgaagtatctagatgaaccaaatacgccgtcaaaagaaacagaggggaatagagtcatgtcaagcgctcgtggagaatcccgccataactcgtccaagcgtcctacagccgcctcgctggacttccacgatctggctagcattgtggcgatgggtactgcaggagctcaagcaagggcggcagcagcagcggcatcttctcctcctcgcgagcacatgacgatggcgcagatgctacaacgcgtgaacctagatgcatcttccggtcctgcttcttcgggagcagcaccgttccaatcgcacaatgtaccaaacccacgccgacgcaagtcgattacgagtcggtcccgaagcaacagcctcaagaacaccttcatcaacgtggttgcacagatgaaaggtggctcccacgacaaggacatcgatgagcctgcggatgttggctctgctacgctcccaaaccctattcgtgtgagtgaagcccgacgcaatgcccgcttgagctcaccttctcggcgggatgagctcaagcgcgagcttcgtgacctcgagactcaactttcgaagctaaatctccaagtcaacgcgaaggaggacacagcaaagcagacaatgcggcgcttccgctgctacaactacaacctcccagaaacagcgctgcgcaacgaaaatgacacgctttcccccagcagcagcaagaaggttcgactgggcggctcgaacggcctgaggaacccgtccccgaaaatgtcgtcaccgccgtcgtcttcgtcttcgcctggctcgggctcaacgtcggcctcagctatatgtggcgaattgggcgactcaagttcattggatggagactcgcgccacttcacgcctggaagctcgccattgcttggaacagataaagtgatatctgggggaaactacctgaattcgcagcctgtgtgggagcgtgacgaagacgccccgtgctgcaagcgctgcaagaagaagttcaaggcgctattgcgcaaccgccatcactgccgttgctgcggctacgtcttctgcagtcgctgcacgagccaccgcatgagtctcccagacttcggatactacgacgtcgtccgcgtatgcaaggtctgctacaactcaggcgaggatgggtaagcttagagatggatggatatacatgcaaggtcgaacggggctgaaatcatcgctgcaagctgtacgtaaccttgtgaagaataacgagccatcgctaagttgtcgactctcgtcctgatgcacggatgataaactgccggttagtgctgctagcacagcaaaactgtgtcgttgtccttggtattttgcgctaatagattggtggggtcgtcgcgcaatgattcaacctgcgattcgaacgtttgggagtcaagacaatgcgaagtgcatggcacttcagaacaacttcaggctgccacctcttcgtgtgacttgacgctacatcgtacggaagggtagcagccttgaagacgctctgaagtctactgcgttttcatgtggatcagagaaatatagcaggtatacttcttagtcatcttaacattggtaaattcctgcttcgactataggcgatacatgtaggacccaggcgtcaagctgacgaaggatttgcaggaggtcaatctactctgttgatgggcaaacgtagtggttcattacagactcacatcgacattggctctaactggccgcacatcggcggtcacgttcttcttggtccgtcgtttgtcagccgacgtcctggctcagcagcagttaatggatgagtgtcatgtcgaaatgctcgcgttcgataggcagcggggtgatattttttgttgcagctgctaggtgctcggaggttagtctaacactatcaaagacttcgatgtttgaatagctatgtattacggtacacaaattgctgaaagctctgcatcgcttgaaggcggatgcaaatgtatcttctcgaaaccagctgacagtataggaattcgtgcgatctcattccattccttcagcaagttgtctttttcaaaactactcccggctcagcgctgctggcgcgctacccagaaggttatgagacaccatgccttgccctgcattggatggtgggtattcctaacctccagcctacgtatggaaccgaatttgttgactgacagggcgttaaaactaccgccggcaaaagtgcgtgaacctcgctgctcaacgcattcgcgtcacctgcgccccgcatcttacgccaatctcttggtcatttcacaattcgcactccagcgcacaaacccaatcgaaatggcgcccggaaatgcctcagagacgatctcgatctcgatacgacgcggtagagatggccagtcatcgtcaatcgttttaccccgcgaccaccaccttacccaacacttggagcggttggtggcatccggctcgcgtcttcatcaacaccccctgagctgtaccagccagaccatggaggactatgacgtggtcaacgcgctgtcgtcggtggtcaagtacattaacgctagcacgcaccacgaggccccatcggaagccctgaacgccatcttcacttcgcttcgcccaccatcagaacgctcgagtgcgcaggcccaactttcgagcatcgacgagcgcctcgcactccaccgacgtcgcactaccaatggccggaggaggatcaccaagcactgcaaggttctgggatgcggtaacatctcagtgagccgcggtttatgtcgtggacacggtggaggtcggcgctgtcactacattggctgctcgaagagcgcccagagccgcagtgttttctgctggtcacacggagggggtcaccgctgcgaggttgaaagctgcatgcgcagccgcaagtccaagcgtttctgcgcggatcatgtgagcctggaaagtgaactaataccggagacgaacggctcggtggtgcacccgaaagtaaacagcggtcgatgcttgccaggcttgcaagaagcgctaagaagtacacagcagtcgtctttgatactctagatcagactacgtaacaggcttgatagtggctaagttaatctacctgtccaagttcatctcggcttgttcaaactcaactcgaagctgtcacatcgtgccatctaagagatagacaggtgagaacgcgctttacaacccagcatctaccgcatcatcatgcacggggtacggcgtgaataggcaggatgagcagtttctctggcggtctggatcaagaccaccggagactcgaatggatcctcgcagttctttactgctgaaagcggtgccgatcatcacgagcgcaccactgcgcaggatatcatctgtggcgtccactgcgacacgagcgagcaggaccgtatcaagcgaagtcggtagtcagggtgcttccagcgggtaacgcgtcgatcggagatcggtgccctggctcagcggcgcaatatatgtcttttacttggttttagtatggggattgttgaagtgaaaagtgattttaggtactacggtgcaactgcaaagatcatgtaacgttaaacgttagttcgtggattcagcaccagcagctgaacgacttgcaacgtagataattgacttagccgagctgcttagttaacatccacttctggtataataaccccttcatcacgggaaaatagggacttccacgtgtaggtattcgactacgctagtgtggctcggagtatctatcaggagataattccaaccccaagctgtctcatcgtcttcgcagtaaaaaaatcggagttgtaatcgatagtagcaacaaccctcacgaccaaaagtgtttgtaaggacctacttagcttgcgtatctagtcttcttcaatccgctactttagacttcttgctactgcttctactaccatggccattgcttacagtcgtacgaggtgcaatcgtgcacggaatagcaaaactcaacggcgccgcgtctttcggtcgagccgtgattctctctcgcgagtactgcgcgtaaaaagctcgtcgcggcgcatccgactcgttactcgacgagctgtgccagacgttcgacaggaaaaacaacacatcacccgccttggcagccaccggctcgctagcacgtcgctgcaactggtctttttcatcttcatccaatgtagacgacccatccagcgacacaaactgcagagctccattctcttctgtaacatcgtccagcgcacaccacgccgacacgtacggcgcgatcgtctctcgatgcacgcacatggcaagctgctcatcgtcgtctcgatgccaacgaaactcgacgtggctcttgggcggcttcaccacatagtgctcattgaagaaaaatacctccgtcggtgtctccacttcggtacccatacaacctgctgataactgggcagcgatcgtcgggagcttctcaaagagcaacgaggcgaagacttgcgggttgtcctcgatgctcttcaactgtttggctcgagcggtcaagtaactcctggagtcgacccgcgccgaatctgagtcacgcatctgcaaaaactaagtacttaagtcgtatttttttaaatgaatcgcaacctctgaaaaaacgcaccgggcattgcgccatgacgtccagcacgcagccctgggcagcgatggcctcagcggattggcgggcgtaaagagcatcgcactcgtcttgtagcacgcgaagttctgggggtgacaatagatccctgacgcaaacccagccgcgagtcgcaaagacgtcgaggagagaagactcggtggacggtggggaagggcgagagcgcttggtggtcatcctggctgaaggtgtgagtgctagaaatatgtattagtgctcttaaatgagttttacagttgaagagcgaaagttgaataacttgtaatttgtattgcactagttgaagatgctaaatgctagtcttgcagtggatgccagctatatacattgaaccgctcttcatgcacacacccaatctcgacaaaacaaggtgaacctacagagcttaatgtttagtacatgtagtagtaaagagcgctgagtggatcgctctgaattgtcggggacggctgagcgcaagtaacttggctggaagaagccttcatctcaattgccaccgcagcaacggggcagacaacgtcaacgtgacaacgcatacaccggctgtagcgagggtctcaccaccaccgacactgaggcgggcggacgaggatcggtcgatccgcgaccgagactaaaatcggcgatcacccagctgctttcgtcgcgccaagtgctgactccgccatcgtgtcatcgttgatcccagcgtctcctgtcgatgtcgtggcacccagacgctgctgtccacgtgattcggctatcaccataggttcacgacaagtgctgttaaagcggaagatagttttgctatcaattcgacgttggcctgaacttcatcagacaaacgctgcattttgatctccactcaactcgaacctcgcagggcgtgttagtacacgcacatgctgtttcccccggctcaatgcaagttaatcaactagtatccccggctcatgtgcttcgttttgcatccgcagggcaagcgttcgtctaacgatgtcgagtcgacgaacattgtcaaggtacgtcaccgcaggggggaaaagcaagccttttaactgtagttatgtactgggtgaccccgtgagtctgccaagacacagcagctccgcatggagcggcaagcccggtggtcatggcaagcgctgccaagtgattgccgtcttgagtgagccgtcattacggcacacccggaagtgcaaggaaacctgcacatcaggcgtgccccgcatcgtgaggcgggccgcccgatgtgcgtcgtgattaatgtctatcacacgaactaaatgaaaaaaaaactaactgccgtcgggttgaaggtgctcggtgcacagccaacctgctacgcggctgcctgagaccttgaatgcagccgccgtcccaggaagcgaacccgcacttcgcaggcgagaatccagccccaccacatgtgaggcaggatcacggcaggttaggcagccttccttcctcgccgaggatagcccgcagagtcgcaacgtgagactcagccgatctgccttcgctgggaaaggagccgcggtgcggatgcagaagccgcggatgcaaacggaaagtcttgtgagccgggggcccacaggcataatcgagcaaattaattctcgcttgggtacatgtagcacgtttttccgaccctcgccaactcaaacagggggacgattgctgtccaggcctgcagaatctccccaaaagggggcccaaactcgacgagaaaatcgcacgtgagcaaaatgatgccctttgcgcatccagcccgatttgcaggattaaaatgaagtggtgaaataccaccagcgcttcgtgtgattaatcgcttgagccaggcagggtgcggcccacggaatctcttttcacttccttccaaacggccaggaaaacaccgaaaagcgctgcagtacgatgcggcggagcaggggaagacatggagagccgcgtaggggctgcggcagcgacgcactcggtgcttggagctccgagaaaatgggaccggctggtgggattaatcaggtgagccagtaccaaattaatacacggcgcatcccaaccgttacaaagaaagattgcacccctacccgcgttcaagggtcgcatttcacttgcagtttgtattgtggttcatacgtacggtatcgacgcaatgggccgcgaaacgaggcaaatgggcgctttttgccggaaatggggcagcttgactgcgcggctggacgtcctgcgcgctctacgtggctggatgtcacgaggctgaaggctggcgttttggtcgacgtgacggtgctgctgcttcatttgagttgagccaactcgctctaagccagtgtagggccctttttttccattgccatcgcgcggatactctacacaaatcacgtgtaggcgcgctaaacgaaacgacctgtgatcgtatgtctccagaacagagggtatggccggccggcagtgctgcatgaatgccaaggagagcgcggagttctccgcgttgagacgccgaccgcggaaatgatgaaaggcgacccgtctttgcgaaactgaccatttgcccgaggattagctggattaattagccttctcaacgctgatttttctcaagaacgccgcccacgggcgacgcctccacccactgtggcgctgcatcagcgcgctcattcttctcctcggacactcgtcgtgccgcgagctcgcagtcctccctcacggagctcagtcgagcgtaatccatccgatcggtttgctcggggttgattaacggggactagggttgcaacggcgcgccctcgtctcaagctcgtcgtcgcctgtcgctgctggctcccgcctcacgggaggggggtcgcctccacaaaaaacttgattattgtatggttgaggccggccacgagcgccgcgccctccgcccccgggagcattcacccagattccagtcattccgcaatttgcgctccaaagctcaagtccaaacaacagaacagacccgtaatcgagccaatgatgatgatgcacggaagcgcgccgctctacagccgcccggccgcgcccgagggcgagaccatctccatctccatcggccatggcagcgaccgctcctcctccatcgtgctgccgcgcggccatgacctggtcaagcacctggagcgcctcatcccggccacctccgcctcctccccgcagtctcagcctcagcagcagaccctgcagccgctcatgtacgccaagacgcagcccgagtccgccgccgcgcgcttcgacgccgtgcgcgcgctctcgtcgctgccctaccagcagtcgcccacgcaggccccgatctcgtccatgtcccagtacatccacgccaactcgcgctacgagacgtcggccgccgtgcccgccacctcgagcctgccgcgctcgccgctctaccactcggacagctccaacaacggcggcgtccgcgtctaccaccacacgcccgagtacctggagctcgctggtgagccgcgcgccacgcgcacccgccgccgccgcggagccaacggcgccagcagcggcaagtgctgccaggtggtcggctgcgacaagatctcggtgagccgcggcctgtgccgtggccacggcggcggccgtcgctgccagcacgcgggctgcaccaagggcgcccagagccgcagcgacttctgctgggcgcacggcggcggccagcgctgcgaggtcaagggctgcatgcgcagccgcaagtcgaagcgattctgcgtggcccacctcaactgggagaccacggcgcccgtggcgcctgcccccgtgtacgagacgctgccccgtcagatggagctgcccatgcccattgtgcccaaggccgtgtcgcccgtcggcagcttgagccccaccgctctgaacggctctccgcgcctccccagtctcctgcaggcactgcgcaacatgcagcagtcgagcatgacggtgcagagctaagttagagagacccaagtagatctagtgtatcagcgcgcaggcgccttattaatattttaacgatgcaaacagttttccaaaccgtttctcgccttctccacctcgactaataacaggcctggaagcccgacttaatcgctatcacggacacgaacgtcggcccccatctcagcactccacggagatacacgccgaagcaagcagcttgggcaggactccgacctcgcagcctgcgagcgtaggcggcggcctggctcagcgggcgctgccaccgtgatggatgagtggcttgccgcaccgtgcggctcgcacgcctcgctggtcctttttcgccttcggaccttcgtccttcccacgcgagattcatgctgggctggtcgggagcaatgcaggagcggggcggcaggaacgtggctgattgccacgttgctcaattactcgtgctgttttaatcgcaatggattggtatccaacttggtcatcagtgtcgtgagcatgcagaccgcatgttgaagctgttcgtgaggccaagcatcaaatggtatggttgaagtcgactggatcgccttcagcactgcgactcgatgctcgcgggtcctttcacacgcagtgcggcgctcggtccttggcgtgccgtacactaggatttcgagagtccgcagccgcacgtcgagcccatggaggggcgcgaaatcttagctcgccattccggcgcctcctcgacggtctcaggagacgaatatgaaccgttgattccgcctgctcctggggcggctgcactgcagccgtgcagctatggccgtcccattctcccctttgcgggctggaaggaagcgagtgagctagctagcaagtagctgtcgatagagagggcgggcgtttgagcagccaaagaccgacatgatggaaggggagcccgcaaccccgggcgtcacccgcctacccgacgaggagacctccttcgtcgggcgcaaggtggaggcgccgcgacgtcgtcagcggcgacagcaagccaagaagaagcgcatcgcggtgctgggcgtgtcggtcgtgaccatgctcgtgttcggagccgtgtgcgccttcttggccctgccgtccggacctaccgagacgatgaagacggccgtgtcccaagccatggagagcgatccggcgaacgccactgcgactcaagtgttcatccccagcttcgccgcctacgatgaggacggagacggcaaagtctcgcttggagagtacctggatcgactggcgatcaatcgcgacgcagcgctcaagcgcgtggacgagtcgagtctcgacgacgcggacaagacgcagatctcggacctgctgaacgaggacttcagcaaacactcggactgtgtcgcgctcgtcacgaagcaggtaacaagcacacagttcttttggttcaaatgcatcgatagtcaggctaatgaaatgacaacgtcgtactttgtaggacgaggacacgatgatgaccaaggagaacttcgatgaggtttacgaggagatcacgacgggcttctgtccgctgagtgacgaccgcatccccaacgagtacctgttgacggagactgcaccgggcgaggacgagctggctccgactgaggtggaccctacaacgggtgacagctcgacgacgagtggatcggacgaagcgagtgcgtcgacttcagcaagtgaagaagctgcgtctaccccaagcgtggaaagcacctcagatggtgcagctccgccaagtaacgaaatcggatggaaccccgaccagcctacgctgcccccacgcgtgatagtcgacgacgacgcaaagcctgaagagggtgttggagcaggacaatggaatccgatctacccgagcgacccgccaattccggctcccagcaacgacccgcaggtgaacgcgtggactcctgaagagcccaccgatccaccgagtgccgtcactgccgacactaaaagtgaagaagattcagcgagtgcttctcaggaagcaccacgcgctagcaacggtgtcggcgaagatgaatggaacccagtgtttccaaccgagcctccgtcaccgtcgagcgacaaggatcaagaacagaaggcgttttcaatcggtaccatgttggacccccaagcggccgcgtacgagacccctctcgccgagacgtcccccgaaagcgagcagcaagctggtatctacaacgcatacactggcgctgagacgacgggcactcagtccaatccggaatacaagtcgccgattgctgagacagctcccaaggccgagcaggcagtgggtgcattcaacagccacagtgagactactggtactcaatccaacccagaagtggcgactgagaagaaggaatctgagggcattgctacgtacaagtcggacactacaactaccggcgagactgctacttacggagctcctgcaggtctgcaaccgactggagcctacaacagctacaacgcctatcaaggttattccaacaactacaacaagggggctgctaacacgtacacgggtgccgggacgacatatggcaacccaagcggccagcagccaagtggggcttacaaccaaggctactacagcggctacacgggtgctgctaacaatggtggcgcctataacgcttaccaaggctacagtggccacacaggtgctaccaacaatgctggtgcttacaacgcgtacactggcgctggaacgacgacgtacggcggtgggcagcagacaacgggagcttacaacacttacaacggctacaacggagccggacagcagaccggtgggggctacaacgcctacaatggctacactggtgccgcgactgctggcacctacaagtcgtacactggtgctgatgggacgactgagtacggcgaatcgaagggcacgaggcagctacgttcggcggggagccctgctaagcacctttaaggcggtggtggggaatacttcggctgtgcgtttaaccgctgggcgcagaagtcgggaagaagagagtttggtttgctggatggtgtctacgaggtcgattgagaacggtgagagcgacctcggttcatggcaacagtatgcgcgtgcattctattgtttccttttgtcggtgtaatgaagtaggaaatacacctcggagtttcactggcacattgtgacgctgcaatagcggatgcagaactcgtgaacgtcaattgctttgttagcttcacgaagcagggccgcgcagtatttgcggaggcgggcccagcgagaggaattaaataatacaagtagattggggctatttgtccaaacgtaagtagatcatggggactacttataagtagactgggggacgttgattaaacgtattttaactatcaccctgctacgcgctgcgcgcggccctccagaccctaaaggctcgctgtgctcgcttggacagaaccctaacaagcccgctgcggctcgcacgcgtcgcctccgcttgctagaagggcaatgctgggtcctgggtttgcatccgcgtgcttcgcacacgggctgacaaaccgcaggcgtgggttcgcttcgctcgctgtgcgctgatggtctgatctacttataagtagtccccatgatctacttacgtttggacaaatagccccaatctacttgtattatttaattcctcggcccagcgacgagcattccagcgaacggacccgttgccgcaactcggagttagttttctttatgcgggggtctgggggtgcaagttggagatctgttcaaatctctgatcagttccgtatacagtcaaacctgtttatatgatcctctctatttgagccatgccgtttatttgatgcaggctttgtcgctaccaaatatttcacttagtttttgtatgatctctgtttatatgcatacaaggtatatgagtcacatttttggggaccaaattaggtctcacctgtttatttgattcacactgctcacggccacacactcttcaaagcaactgctcaacactcaacgcctaccgcaagccttctccgctcgccatgtctcctcgcacctgtcagacgctagaacaaaagctccaagtgcacctaaagctcaagcagaatcctggcatgaacaaccccatgctcgccgagtggatctacgcagctttcaaggtccgggtcagccgtgccacactcgcccgactgcgcaacctgccttcttcctacttcagccacgtcgacctgagtgcgaccaagcggcgccgagtgaaattccctcagttcgagcgggaactgagggaatttttctttcagaacgaagctaaaacggcgatggcggacgacgtgctcctgctgaaggcgcatgagctggcggagcgcttaggcatcgatgccacgcagctccggccaagcaacggctggcttcaaagctttaagaagcgcaatgggatccgctcccatacgctacacggcgaaggtggcgctgtagaagctgatgaagtgcgagatgcgaggctagagctacaagagttggtggcgcagtttacacccgagaatgtgttcaacttcgacgaaacggcgcttttctatcgcttagcgcctaatcgaacgctagctacgactattcgcaagggcaagaaaaaggagaagcaatgtttgactttggccttctgctgcaacgcgactggctccgacacgctcgacccaatagtcatcggtacggccaagaacccgaggtgctttagaaagggagcggcgattaaaggtaaacctatattgtacaagtcctccacgaacgcctggatgacatccgtcatttttgacgaatggctgcacctcttcaacatgagaatggcggccgccaatcgcaaggtcctacttctagtcgacaatgcttcatgccacaagattctacgaaacctgactcatgtgactgttcacttcctccctcctaacatgacatccgccgtacagccgctggatgcaggtaaatattttatctatattgtggtgtagcctaaactagccaactctattacagtgttttttattcaggtattatccggtcgttcaaggctcggtaccgaaagtattttgtgcggtggtgtttggatgcacttgaagctaaaattacacgcaagctcaacgtactggaagctgtccaattctccattgatgcttgggcgggtgtgacgccaacgacaattacaaattgctgggtcaatactcgcattttgggaggaaagatgctaggaaggacccgtggtgacacggattacattgaggaggtatccagcaacgagatggaggagttaacggcgatgctaccgaggtgggagggcgctgttagcgctagtgagtatctggcagtggacgaagacgttcctgtgcacgagccagatgtgctagtgcaggaagtgatgcagtttcgcaggacgagcaggaggaataggaggaacaggaacccgcagttcaacctgccattgctctgagacactgcatggagctggttgcatttctgctgcaatgcggagagcagactgacagagaacgaagaactttacaaaccgtgaccgctttggttcgagagactacggtgaaggcaaagcggcagcgaactatgcacgatttctttacgtgcaccacataattgttttaactgagtccattttatatgagtcattgtagtagatggtcaccaacagggcctcatataaacaggtttgactgtactgtaccactccgttccaaaaagaaagcatgattcaccgtgaaggttgtttcagaaagatagcacgaaaaaagacttggtttgagtatgggagggattactgacatcttcaaatcacggatgacttgtgcatttcggaagagaaaagcctactagccatacgatattcaagtgttcaaaggtcaattctaaacggttcaggtacatgtaataaactacaccgacggacagaatgcaacagccagtgggaagcgatggtgaagatctggtcactgtacgcctcataaacagccgtttcaatacagatgcatgattggtttaaataatttatgggatgatttccctagtaagactaagtcttggattttgtaacaataccagaaaaaattcggatttttattggctaaaacagtaatctactgtgaaactggggcgctcttcgcgtgcgggtctctaagccgaggcaaacgcaccgaaaagttttgcgttttttgctactttaacggctaggacacgctgcgccttattgttattaccattatcatcactattttggtgagtactatgcatgtaacgcttcatatgactacactagatattttaattctcatactagagatgctctgagagcatttccggcggttggtctcaaatacggtcataattgatgttggcaacatcatcatgttgctattggtattgattgcaactgccactcgccgccactgccagctactgcggctgctactgtcactgctactgccactgcttcagtcactgacactgtcactgccactaccgctgctactgctactgatactgctaccccatctctacttctattgctatactactgacattccactattgttaaagaaattgcttttgatattgctacctgtggcgggcgttactactggtcactgtcactgcttaggggctggttgtttccttgtcggtgttttgaaggtgtgccataaacatgcaattccttttttctgattggttcacattaccgcatcgcccctgtcctaagcgaatctcaatgtactttctaacagttagggttagcttcatggccaaatgattagattctaaaatttagtaaataggctagatcatccgactcaaaatatgcatatattgtgcgattatagtcatttgccttatgatcgagcttccttgtatatttgaataccttgtggtgcgttgatgcgaatcatgacatgttcttcggtcaatgtgctcgccatccgtctatgattagcgtgcttggcacagcagtttagcatcaaacatatgtcgataatatgactctctcattggtcaatacagaaattcgcttaggacaaaacttcgcttaggacagggccaacaccaagggaggggggattttcataacgattcagaagttctaccatggaagctgatatgaccgaagaagccgctgtcgttgccgctattggggcgtgcgcgtcagcggtcgcagcaacgctatgtgtagtcgccaagaagctgccggtgcagggatacgaaagtcgacatagggtctgcagggatacgaaagtcgacatagggtcctgccacagcgcagtggtggtgaggctcctgcgtcatcgttgagttcgacggggtcatcgcttagaaagatctatgaagtagtgttctcgaacaccgacgaacaccgacacgagcgaccagaccaacggattaggggtaggggtatatgtagtgttgtttattaccaagttaataactactaataactggtattaggatttttagctatctaataccgattggtaataccattatgtaaagattgtgtacgataaactgtcttttttgtgtgcagtcaaaaccccgctcagagtccggaagaatgcgcttcttcacaatgatatgacttcatgcttgttctcactagtgtcttcttaccactaggaaggtatgatgagcgcattggtgctaacctcatcgtgaataccaattaccgttattaccttcctaataccttcctattaacggtaataccttttgtgtaaagttggtgtgtcaggactactttagctaataaaacaaaaacgagatgaggatagcaccaatgcgctcatcataccttcctagtggtaagaagacactagtgagaacaagcatgaagtcatatcattgtgaagaagcgcattcttccggactctgagcggagttttgactgccacaaaaaagacagtttatcgtacacaatctttacataatggtattaccaatcggtattagatagctaaaaatcctaataccagttaacagtagttattaacttggtaataaacaacactacactcgacaccggacacgatggaaacaactaggcccttatccctactgcaactacagctactaaaactactatttcacttttgttaataatatcatagtaatgctgtcattgatgttgctagttcatatctcctgctatcgctgctgccactaccgttaccgctgttatttacgctacaactacaatatcagcattgataatgactttgcaatgatgtttcccctgctttcttcttcacgccggagaaagactgccaaaatctacttcatgtttctattatatattgttgcataatatcactgggcatctcatggcttgcgcaagccaaatttacaagtagatgccgtctgaacatcaccgtccccacaagcattaccgatgatcttaacttcttatcggtcgtctagactttgtatatcactctcctcttttctaaatagtatatgtaacttgtattgctgcgtaagtaatatcaatacgaagtattaatatttcttattcagtaaaatgctattggaattgttctcctgcgtcaagatcactgcccgctaccactgcaactgccctactgtcaataccaccactactgcaaccgctattaaataatagctttgctactgatattgctatcgctatttctgttattaacttttttctgctcgccccggtgcgtgagttgttgcaactcagtataatgtcatccaacgagactttttcgcgaaccgcacctgttaagatatctctatttacgaacgagcagtttacacgtcaccgcagttatgaagtacgcgatgcaaattggcttgaaggcgctaatttcgctttgttatgcgttcatattactctagttaggttcttgctgcagcaaaccttacgcccatctaatcgggcacttttagggttaaagtgcaccaccatggccacgaaggtggcttgtccgtctatcaatcaatgtctcttctgtacctactgcagctcaatatgatgcgacgtccagaaaacactacgtatactactgtggtgcgacgtccagaacactacatacactactgtcggtttagtcaacgtcgcactgcgccgaagttcgcacagcatgcatcgtaatggtggcgtgtgaattaaaccgtgtatatttttgctgaagttttattccaaatccaaaaccccgttaaggcatcgatccggacgcttcgctgctttataccggtaataccatgagattttggatactctagttcatattaaaaagtactgaatgtattaaaccgatggtctgacaaaaaatgatgctggttctaagctatccgcttagagaacaaacagtgcaaggtgtctacccttatgtacaagagtacctcgtctatttccaagcggcagctgctgaggtggctgttgcattctgttcgtcggtgtagcacatcaattgaaagatgagaattcagcagttcaattcaagtggtgcaatttttacgcgaaaacgttgaaaattgatttggagggtgcattttgacgccaatcgtgctttcattttgaaacggagtggtattcgcagttcgaagaactgtcgattggggaagggttttggatgacatcgaatgacattcacgctacattcgtcacttcaccccacatcaaacaacatttacacaacatcatacagcaatcgatcgaatcggtctggatgacacttacaggttttgatggatgcctattctttttttccttctactgtagattgatgtcagatgccatcagaggaagtgggctccatctactactacgacgaacaacgtattttatattagcggactactaacgacgaacaacgtattgtgtactagcaagcattgtattctttcgatcaatatgagacatcggtgctaatgatgctaaccttggacacaactggatcactgcatcgtattatactactgtacatgcagcttcaaagcactcaacatagtacttattcattccattagcggtaaaattatcgattcgatctgttatgaggcataacttataccctacacagattttcttctgcatgcatagtttctcagagagagatattgaaaatcgtgtggtcaactgagtttgccgtgacataaactgtcggcgggctgatattgtatggatccccacactcactggaattaatccggatggattagataaaacattccactaaaacattgcaaaaaactacttaaagtcctaggttgtgcgatccatgataggaagtatagctcgattttttttcgttcaccattttttttaatccgaacccaactctatccgccggcaatgcggtgacgtcctatacggtgacgaacgaattcattcagcggagactcaaaaagagctgcacctggtggtatgtcttctccgggaaaaaagctaaaggctagctgcactagcttaggcatttatctatgaagactaggatgatttaagcttgtcttgtgtgagactacaatacgacccgcagagatccaccgaactggtggtgtagaatgatctactacttgatcatgttcttgtcaaaacaagttcaaagtacattgttaccgatattagttcagatcatcctaatgctacatgcatacagtaccttcagattaatacttgataaatggcaatatcacacttggacgaatcgaagctgacgatttttttgttgttgttagattttcaggcgacccggacaaaatatgtgtgcggctgcaccaagttttatcaaacagagtttgaatgctcctacgttgtcgctgtacgccgcgaatcctgtgcgagaggaagcaccgggcggacatcgtcaaagcgaaggacaaacacccggtgtatcttactcctacacgcgatcgaaatctgctagacctcagttttaactcatcaaacttaaaacaaattgctggcttcatcggattatcctgcaagtagttatcctggcagcgctaattattcgaatgcacgttttttttcttgttttatcgtcacctgtaagtttccgagcacaacactgcaatctaaacaataaaggattctgcctgggcatcagcgcacatttcagtagcaggaaggaaggaaattacgttgattacctcgctgttgataaccgttctactaactacaaagaactaaagttaaaactaaatccgtggagccctcattcgacgagcaggaggaggtagaatcatcacggtgggtttgccaaacccaatcgttgaagtaccaattcgttggagtgacgatacatgtcagaggtcggaaaaaaatatttcaattcaataaataattgggttttgcaataaaaatcgttattattggacatcccagctagtgacatcccagctagtaatacaatatgatattgacacaattattgacaataaatatcaaaaaaagtgcagttctgcggcccaccacaaatccacggttgatggcatcacatggcaccaccgatgacatcaacaatggggtcctccacactacactagcgtcgatacaattactggtcaggagcagactcgtagagaagcccagccgccattctcgggcggcctagcgtctcatttcaacattacattctccaaaaacaatggtcttcaacaagcttctcaccgccttcttcttcgaccatctcggccaaggcctctttcgctgcaagctctgcgaccaagatcgcaagcagatgcccggatccgggtacgcctaccttctggcgcacctggctggtaaacacgaggggtttgaggcccagtactcatccttcgagagcagctccatccggtccctccaagcctttggcttcgtccctgaggaggcgagccatctgttccagtggctgcaatgagttgtcatgcggaatatgccggtccacgaagtcgaggacgagctcactcgagccatgagcaagctgcgccccgtcacagctaaggctctaaagaagtgcatggaaggaatcgcaatcaagattggcctcaagctggggagtgagctgggaaccctgttcggcctgatgttcgacggctgggcgcatgctggtgtgcattacgtcgccctgtacactgtttgggaggcagatggcgaggtgcgcgtgcggctgctggggctctctcatctaacagacggctcgcagaccgctgacgctcacgtggtgatgttcaaggacgttctcgaggtttacaacaagaccctcgacatggtggggtttctggttggtgacaactgcaacacgaacctatccatcgcgaccaagatgggcgtaccgttagtgggttgcgccagccaccggctcaacccagccgtcaagaagtttttggcgccatacgagccgttgctggatgaggtgaacgccctcatggtggagctgcgccacgagaacaacttcgcggagctgaagaagcacaccgacctccatcctgtcaagcgcaacgtcacgcgctggtcatctacattcacgatgctggagcgttagattcgtattcgctccgagatcaagaaggtggaggcggttgaggaactgatcccaacggagggcaagcaccgcaagctcgtggtcttattcgagcatctgaagaagttcgagagtatcggcaagcggctgcagcgcgaggatacggacatggcggaggtgcggttgatgtttgatggtctggtagcggagtatcctgtcatggcagagcaccacaaggcgtcggctaagattgtgcacactcccgcctttgagacaggtgttgtgaaggtgatcgctggttcagctctctcgcagtcggaaacagcagctctgaagcgcttcgaggtcaagggcccagctggaaagaagcgtaaggagagagaggaggactacgcgtcgtcgctactccgaggaaaggggaagaagcagaagcagaccgccggagccaccagctacatgcctctcgtgaagatcccaccggcttcaaacactgtggaacgtctgttctcgcagtgcaagctcgttttgaccccgcagcggcgtgctatgctcccggtgaacttcgaacagctcgcgttccttcgcgtcaaccgcaccatgtgggatgttacgacggttgctagcgttagtgctgaggaaaccctttagatcgtaatccagttagcgaaagtgcgatctttaccttgccataattttagtgatatatttaatattcattgcgaaaattggacgaaacttgagatctaaaacgaatcatacatgtataagcctaatattcgctgttacgatgcaggtttccccggagtcaacatgcaaatattgacgaagaagatgcgatttatctagagttggtatgcctcgttgcatgtatatgcgcttatttacctctttaaatagatataccgcatgatcaattttaaggtaatgtgcggtcacttattgttagaaccaattctatattaattatagtcatcgcacttttactggctacaatttatagcgataccgcttatatttatagcggcaatgcacttcaacattaaatttatactctatgcgcttgtttcccttgggccatcactatccctcttgaaccgtgatgcccaagaaaaacaagcgcctcgcacatattggcaagctggccgactcaaagcgttcaagtaccagtcgtactcgtctagcgtcggtgcgccaagtgcccctacgaatgctgttgtgagcgactcaacttcgtcagagagtgacagctccgacattgaagggccaaatgtatacacccttgagtttatttatgcgaaaaagactgatctggatggcaacgactactactttgtgagctgggttggatatttggcagccagcgtcagatttaccacaagatgccattgcgcgttttgaagaggaggagctcggcgtgttttggcctgtggatcgcagagattttatcgagataggcgtgcctacgggaagtagtggtagaagagcgagagttagaagaacatgaagaaataactaacaatacaatataaattacggcaatatttactattgcttgccgctatattgaaatctttattatggagtcatgctgctggcaatacaatttttatatggtattggcggacctctgatacatgtatatgaactggcaatgcctttgaaaataagcgatcaaactttgtacacttggatgtaccgtggtagattaggcagatgctgcggctgcgacgcagccgcaggggatgcccgagtacatcgtttccctgtaagggtatccgtacaagctagcgaaaccccccaggtccaccacccgggtccccaacgatccaatccggaggtaaccgatttcgtaatcaactcaacaggattttgtaatcctgttgagcaatgcgattggttttattcttatatactttcgagtacattcgcgtatttcggagtaagctcggactttagttcgcgcgctacatcaattcacaaaactttgattccactctaatgttgcttgccgtgaggggctggtcagactggctggtgctggttctcggtccggtgagccaaggggtacagcgagctactcggttttgactctgtctgctttttgtccaaaatgaacaaaacataggcactttactcaaaaccggagaaccacctcgagttctcgggttcttggcgaatgatggcatcaccaacgtgctagagctctttggcacgatatttctttctgtttttggtctaccggtataagcttatcacatccgcacatgagcttgaggaaagccagtgtgtcatccgcggactgctcatgtcaattggatttctccctcagatgcattcgtactgagccctcatcctgtgatgccgcactcggcatcttaacctttttgcgtatgttcactcggaagttatccaagtacactccacgacaaaaagatatggacaccaccaaaagtggctgtaacttcgtcattttttatcgttttaaggtgcggtttggactagagttgcagaacacgctgataaagatctgcacgctactaacacacgcgcttttgcgcttcttcaggtagcacacatacaaatcactggttctgcccaggtgacaaaacttatggacagctaatccccatgcaaaatcctatattaaccaaaaccccttacaaatgatacaacttggactttgtatggggcgacaaaggaaccagcctcacggcgatactcgcgacgttagacaaatatctgatggcattatcgtgtactagatggtgtgtttagtgatctgtaataaacacatcgaccatcgcacagaactgagcaagtagtaagcgactgaaatttcgagtggtggctaccatgtattatctgatgatttgcgagacaccttcagttgcatcctagttagtgccaatttgtagctctgtatgctgctatcttttggatatacgattgtcttctccattctaaactgttggtcgatgatatatggctcagtactaaggtagagtggagaaatcatgggttcctttgtcgccccatacaaagtccaagttgtatcatttgtaaggggttttggttaatataggattttgcatggggattagctgtccataagttttgtcacctgggcagaaccagtgatttgtatgtgtgctacctgaagaagcgcaaaagcgcgtgtgttagtagcgtgcagatctttatcagcgtgttctgcaactctagtccaaaccgcaccttaaaacgataaaaaatgacgaagttacagccacttttggtggtgtccatatctttttgtcgtggagtgtataacgttaccggtactcgaaattaagtagcacccagctgctcaacgacatcaattgctgcgttatgaatcgtcgtggattttgagcaagattgcgtccaaggagctctgcattcggatgtgttcactcctttttgcgatgcgatcactccccctcgcatgcattctccttccagagtgcatgctcttcaagttgccgtgctcacagctgacgtcagactcctctgggtcggacacagcttcagtgatccctggtacactcactttacaaaacttcctctcgacaacaagtcaccaaacagcttatcaactatgcccagcatccctgccaccttccaggcctacgagtttgccaactacagcgacgcgctcacggagaccaagctgaacacgcaagtgccgcaggagccgctgggacccaacgaggtccgtgtcaaggtgctcagcgcggccgtgaacccgcttgactacaagctgcactacttcggggccatggttattgcagttggccccaccgccgagaaacctctccgcatgggcttcgacctgtctggaatcgtcgttgaggtcggaagcggcgacgtccgcggcttcaaggtgggcgacgctgtcttcggctcctgtgacatggccggcatgggcagcttcgccgagtatgtggcactggaggccgaccacctcgcgctgaagcccagcaacgtgacgttcaatgaggctgctggggtgtcaattgccggcctcgccagcttccagggacttatcaaccgcgccaagatcgaggctggacagcgcgtgctggtgctgggcggcggcagcgccaccggtcagttcggcatccagatcgccaaagccttcggcgccgaggtgatcgcgaccgccagcccccgcaatgctgagctggtcaagtccctcggcgccgaccaggtgatcgactacaccactcagaagtgggtcgatgtcctcaccgagaactcgatcgatgtcatctacgactgcgcagtagagtcggaatcctggtccaccgacgcccagaagaccctcaagaagagcacgggcaagttcttgactatcggcatggtggagaaccaagcccagtcgccgatcggggccacgctcatccagtactactgccacccgatcgccgaggacctcgagggtctccggaagctcattgctgccggccagctgaagactaccatcgactcggtctaccccttcgacaagctgctcgacgctatcaagcatcaaatgagcggccgcgcccagggcaagatcatcattgaaattgccaaggagtaagtagctgggaccagcagtgcaatgtatatatacgtacatgccatcgatgagcaataaagcgcactgcaatctctgtttacttgcttgtctacatgtatcacggtaagggtctgttgtttgttgcctggcagcatttgctcgaggctgagccgtgaaggcttcccaggccgttaccaaggcattggtacttcacagcatgagtgcttggtgttttggcgccaccgactgtggtacaaacgtgcacattgcaatgcacaacgaccataggaatcatagttttacgaaccactattaggtgtttggacccctgaaacctcgtattgcagcggtctgactggccaagcaaaccacaaagacgaccatgtcgctctcgcggccagcagcaaacgtgcccagtcgtttaacagtcactgcacccatggatgcagatggcgggtgtcaaccgcgaacatttgtcggcggcgtcatgttcgctgttggaaataccagcaacttcaacacactgtggaaccgccgggagaatctgaagtttcatcggacgccagccattggctgaattttcttctagtatcttaatcgattggctaaaagtctgaattatcagaaaccagagcgtcggcttgacaagttgcactttgcctcccgtcctcctcggttagcaacaacacggcaacacgcgagaagtgcgagaagctgcaccattcgccctcatccttcacatcgcttcgagtgtgccgccagcaggttctgaccttgactgaccatcactcctgcaagttgatgttgcctttatcaacgtcactttcgattccgcctgctggagcgcacccgacagtctaagacacaacgagagagagagaggggaaggtcagccccgacccaactcaatccgaccagccagcctcagccatggcggaagcgcatcaagccatcggcgtcttcgacgagcacaagcgcggcgtggagctgctgtactcggacgagggcatccgcgtgtccttcaccatcccgccgccccatgagctgcgccgcagcgtcgtccgcgagctcttccacctccagcgcgcgctcaagcgcggcgtgtacccggcgccgccgctcgtggccatcctgacggttgtagccatttcggtgatcgtcgtgctgtcgccctccgagtcgtggtggcgcagtggacccatttcggtggtcgtctggcatgtcggcaacttcttgatgccctactggcacctgctgcccaactcggtctatgtggcgtacttggcggcatgggcggcgttcctggggctgctactgctaatggcggtgcagaggctgttcctccgcctgctgctgagctacagaggctggctgtacctcgcgccgaggcaaaagagccgcgtcgtcatggcctgggcggcgctgctcaagatcttcggcgggcgtaacccgttgacgtactcgttccaggacgcgctgcctcgactcccgctgccggcgctcaagggcaccgtggagagataccttaagtcggtgcacccgctgctgacccccaaggagtacgaggaggtggagcgcatggccgacgagttcgtgcacaaggaggggcccaagctgcagttctacctgtacctcaagagctggtggtcgtccaactacgtgacggactggtgggagaagtacgtctacctcaagggccgctcgtcgctcatgatcaacagcaactactacgcgctgcctggagccaacctggacttcagtctcaccaagaagcctgtggctctagcagctgcgctggtacacgagttcctgctgttcaagcaggacctggacagggagcagctcgccccgcagctcatccgcggcattgtcccgctctgcatgggtcagtaccagaggatcttctcgtgcactcgcatccccggacgcgagaccgacacgctcaagctgtaccaccacaagtccaagcacattgccgtattctgcaacggccgcgtgttcaagatgccgctgttcgagaagggccaatacggcaagctgctgaccaagttcgagatccagcggcagtttgagtggattgaagcaacatctctggcaatgggaacgtcatccaacgctgagcagaactttgctgcccttaccgctgcaggccgcatcgagtgggcggagaaccgtgagcagttcttctcgagcggtatcaacaagcggtcgctggaggctatcgagtccgcggtgtttgtcattgtgctgcagaacgaagaggccaaggactggagttcgatgggcaaggatctcattcacggcagcggaggtaaccgctggttcgacaagtccttcaacctcgtcgtctacaagaacagcgtcgctggaatcaatgcggaacacgcctgggccgacgccccagtgatggcccatgcgtgggagcaggtgtacaccaagcagtgctacactaacccgtacgatgcgaatggagacacgctggtacagtcggaagacgagcgctcgtcgaagctgccgccgtgcagaatgctacaatgggatttctcgtctggcttagacaacgctgtgttgaagtcgcttgcagacgccgagaaggcgattgctgattttgacctcaaggtcatttcacacacggactacggcaagggtctgatcaagaagttccgtgtgagtcctgacgcattccttcagatggctctacagctcgcgtactaccgcaactcgggcaccattacccagacgtacgagtccagtatgacgcgcttgtaccgtgatggccgcaccgaaactgtacgacccgtgaccgacgagtccaaggcctttgtgctcggaatggtggaccccaagctatcggacgccgagaagctgaagctgcttcagcgcgcgtgcgatgtgcaccaagacagttaccggaacgccatgagcggcaagggcatcgatcgccacctcttcacgctctactgcgtgtcggtgggcttcggtatcgagtcgccgttcctgaacaacgcactcagccgaccgtggcgcctgtcgaccagccagcagcctcagcagcagaccgacaactggcggctcgtagagaaggcgttggagggatccaagttctcgatcgacgatgcgcgctgccctggcggaggcttcggccctgtcgcagaagacggctacggtgtcagctacatggtggcgggcgaggacatgctcggcttccatatctccagcaagaagtcgtgcccgtcgaccagctcggacaagtttgcaggcgacatcgagcaggctctggctgatctcaaggcgctatggcacccgaaggagtaagcacatcgtcggccgtatggtcatgatgaatgtatggtatccatgatagccaaatccaatagtaacaacagtcaatagcacattacatctttcctgctttcatcgagaatcgcttggatccattacgacgtgcttgttcactccctaggtctgcttgttggcagtggcttcgcgacgtgccgcatcctgcagcagctccgtgtccacttcgcccgccgggatctgcacgtagcggatggagcttccgcggataaagcagttcttcatgttcatctaaagggcaattgcaacacaaaaaggttatccacacgcactcgattagagaataattaatacgttggtaagagtttttataccgtaccagttgggggaacttgtcgccttccacgaccgacacgttgagcagcttgatgttgagatactggtctaccgagtcgagcacgcccatgagcgccacgtcgttcttgagctccacggccacctccttgccgaccagcgtcttgaagaacgagtagaagagctgcagacacacatcgggtatacatatagcggcaaggggttagttagggaggtgtacgcgcggcaagagggggcgacaccttcgcaccattgtcctggtcttgtggctcgagcaatgatgcttggtttatcaaggagacattttgaccaatgaacaataaggtagttggattcaactggatggaaagaaaagtatacagtatacatagtgaagtggacacataatttgtagacatggtatactaaagtaatggtatgttgccctggtattgcgtgaatggcatttcagtttgactaacttccactaagactctgtttgcggcaaactttgccagcaggttcatgaagacagcgattgcgtgagatcaacttttgcgtcgcgatcgatgatcactgcggtgtatacattttcagctataataaaagtatgtgcatcgggttctggccattcttggatctgtttactccgcagcttttgcttgttgtgccaattgacaacctaaagccgtctgcacttcttgtattcgcgctgatcacttgatactcgcctgcattctgctgaagagtgtatgcgcccttaaagttggtccttcacttccgggacttggcacacagtctctcactttcaaaattacaccaagtcaaccaaccaaacacctcccaagcttctccacgatgtccagcatcccctcgacgttcaaggcctaccagtttgccagctacggcgacgtactcaaggaggccaagctgaacacgcagacggcgctgaagccactggaacccacccaggtccgcgtcaaggtggtgagcgctgcgatcaaccccctcgactacaagttgctcatgttcggagctgccttcctgccgacggccccgactgctgagaacccgttccgcatgggtttcgacacggccggtgttatcgttgaggtcggtagcggtgacgtccgtggcttcaaggtgggcgacgccgtgtacggcactcccgacattactgccggcggaagctttggtgaatacttcgctgtcgacacgaagtacttggcgcacaagccgagcaacttaacgttcaacgaagctgctggagtgccgatggcaggattgaccagctaccaggcgcttaacaacctcggaaagctcgaggctggacagcgtgtgctcattctgggcggcagcagtgccacgggtcaattcgcgatccagatcgccaaggctgtcggtgccgaagtcatcacgacggccagccagccctcgcaacaccgatttggtcaagtctctcggggcagaccaggttgtcgactacacgtcggagaagtggggcgccgtccgtgctgagcactcggcggacttgatctacgactgcggtatggagcctgagtcctgggccgaggacgcgcaaaaggttctgaagcagaacaccggcaagtttgtcactatcggcatgggcccgaagccggtggactcccccatcggtgccacctttcaccagctttacttgcacccgaccccagaagacttgcagggcctcacaaagttggtcgtggccggcgaagtcaagccaacgatcgattcggtccacccgctcgagaacgtcttggacgctatcaagctgcagatgtcgaaccacgcgagaggcaagatcatcattgaggtcgccaacgagtagagcattaatgcctacggatacaagtcgagacacaacggttcatggagctcagatgttccttttgatctttagcatacagcagtctaactttgactgaacaacattaatgcgaacgattttacttagttgtgtatttagaagctgataaaccgtgccgattcctgctcggtgacgcgcgggagggccgaagaagctagcggtacgctaaaggaatattttgttgcgtagcacggtgtcgatgtcgagcgttcgtggcaatatatcctgactcctgaggtggcgatactgtgtcttgctgatgaagtctgcggcaggttccaggccgatactggcaccgcagacttgcacggagagaacacgggtgctgataccgatgacgagcagcattgtcgtgcagcagaacttgttgttcagtcgcattccagacgagggtctttggtactgcgaagaaattgcagtgtgctggcatccaccatgctggtgcttttggggagctgtgtcgcctgtccccgataagacaaacaggctcggtgtcgcattggctgcccgtccgagcgaagggctcagcttgcgccacagtgttcaagagagcaactgagctggacagctacttcctcgctcctaagaaatagaaacaatgacatgctcgtagctcatttgagagtacggtgaaaatctgaagatgttcgggtggtcgcttcagaaatctttccatgtgttttgtgtttcagttgcaagacgtttcctcacaattgaggcttgaggctcacactacgccagccattttgtgccgacgattacgagcaacacgtgcctgtatttggtgtaagtacacgtgtatgcaagtagcaagaacaactccgaatggtctctcaaactcagactcgccgctttggtgaattcatcagttcttggtaacgccactactactgtattgtagactttccaggagacgcagatgtcgcctaccatggtagcttctaggtacttgtcataatcgcctggtattgccaggctggcaatattcctccacgaattgctcttcggcttcattttattccacaaacagccttcggctcgagtatcacggacaggtacttgtcggtgtcatcaactcgatgatcgactggtataatagtactgccagagcttctccacgttcggacgcacgtccgccttggtgtacaggccgatcttattgaactcgagcaccctggtgatcctccatgctcataaggcgccggttcgagtcattgtacatgtagtcgaggagatcctcctcacccttgccggtgacctcgagcagccggcaaccttgtctccagcaatggggtggaggaggttcgtggtggtggagtgcgaggggcacagacagtggcgtgggaatgtttaagcactcgttccgagggtgattccccgattgaggagtcattgaagtccatgaacacgaccgccgggatgcattggattcgcttgtcttcagtgaagactcttcacgcgctgctgcttcctctacgacgttaaattcgcgccaagtcgcgaccctgttcgggaaagttgggaaaactgacgctgctttgccaaacttggtcagcggtggtgcgttgttgaagttcagtgtagccatgttcagtttgaccagcagcgatttgcacaataccgtaagctcacaggtgacgagcagaagcgcaaggctccaagacctcggtgatcggtgatctcaagacggtgacgaagtcgacaccacccgtactcatcaaaggggtcgtcctggttgatcgcatttctggcgaaggtggtcgtggtgaactgagaacgagttggttgatccgctagcgccaacttcaaacacacatcgcgtgaaagaccggccacggactctggccagtgctgcgcaagacagaccagcgcgaagcttgcaagacggacgccagcggcatgttctccccgtcggcagcgatgcagtcgcccatgtaaaaacctcgcgaaactcaataccgaaacgacgtagttaaacatttttgatgcttgtctttgccgcaatgaaaagtgcaaccaccaaaccaattcgtccggcggtcaagcgcgaggctgatggctgtatgggatcatcccatacagcgagcaagcatcccattgggatgcttgctcccctgtttgcctacggcagtcgactctggcagagcagagttgctgcaatacagtaagtagcccgggatcggctagcgaaaccagcatgcgaatacgcacaacaattcagattcatgacggggagctccattcatcaattgcatcttggtgtgcacgcgtcggacatgcgtggagttaacactctcccataagttctccaggactcgcaagcccaaaacagaggccgcggcaaagtgaactcactcatcttgcacagacccgaggcgccgcattttcagccagtcacggcgacctcgatcttgttaaacgcgctgccattggcgcaaaaggcgccgcaccgccagaagatttgactcaacgtccgttgcactgcaaccgcccgactgacaaggttcaagcggcagactaactgagcagcgcagtgcaacctccttatcccccaaatcgggaacacgccactccatgcaccgacctcctccatcctcgctctactccgccgccaggtcattccacattcggctctggcccccacacacccgcccactccaccctctaccccctccctcttcaccactaccaccacaatggctggagacaacgtcgccgtcgccaagcccacgctcgaggtcaccggcaaggtcagcgccggcaaggccgaggaggagttccgcaactacaaggactcggaccggcacgcgctcgtgtcgcgccactacgcgctcatgcgcaagaaccagaccgtggccttcaacgacaagatgcaggccaagtacggctccttcagcaacaccaagatgactatctgggaggccttcacggcgctcaagggctacgtggactcgtccgacccggactcgtcgctgcccaacctcgagcacatgctgcagaccgccgagggcatccgcgccgccggccacccggactggttccagctcgtggggctgctgcacgacatgggcaagatccagtacctctggggccacgccgaggacggccaggagggcacggccgacggagaccagtgggcgctcggcggcgacacgtgggtcgtgggctgcaagatccccgactcggtcgtcttcccggagtacaacgccagcaacccggacatgagcgacccgcgctacaacacggagaatggcatgtacgagccgcactgcggcttcaagaacctcaagttcgcctggggccacgatgagtacctgtaccagatgctcaagttcaacgagaccacgatcccggacgaggggctcgccatgatccgctaccactcgtgctacccgtggcacaacaagaaggagtacgcgcacctcatgagcgaggacgactatgaaatgatggactgggtgctcgagttcaacaagtttgacctgtacaccaaggcggacgtgcgtccggacgtggagaagctctggccctactaccagtcgctcatcgacaagtacctgcccggcaagctgtgctggtgagtggtagtagtgacactcgaaccgaagcctgttattgtactggcgagatgaaatgcaccaccaaactttgacggagcgtatctcagcatcaaataatcagaatgatgtgagctttgttttgttggaaagctctgtgcttcctcttttaagtaaactacgtttggacttgtaatcgcagcgaatgaatgatatatacctaaatggaaattgactgtccgccggtttctcgaaaatatcgaggccatatggtgccatatgattgctctttttaaactagcgtagcatcacggtcgctgcgctcatgttgctttaggggtcgacccccaaaactatgctgaccacagagttttggacgacgtccccacttgaggaatttgagtacaaagccgcttgcaaattctagcgctttatttcccctttcacgctccccgatatgctggctattttgcaaacaacataccattcatacgttgttattaacggtagactgatacacctgacttgtggttcgaatgccagtacacttgtattttacttacttaggtaagtgtaatagcagacaacataccattcatacgttgttattaacggtagactgatacacctgagttgcggttcgaatgccagtacacttgtgttttacttacttaggtaagtgtaatagtagaatgtgcacactcgcacaacgaaaagtgaataaggagttaactttcgatgtttcaatttcgtggtgtgttcattttcagagtgaaaatacgagcgaattattccagtaacctttcgcgatccatgttgaaattctttctccagatgtcatctgcacccagccgcaatggccaatgttgctgccgcgactatggcatgcacggctgttcaaaactgttagtctgcacgcgtaggtagataacctcatgcacgttgagcgcaataaggaaacatatacaatgaacgataactagctcaaaataatgtagttgaccctgatatcgtaccatcacacatgcatgtagggtatcaaagcagagctgcgacgcccgagatcgacccaacagaactgtaattgagtgggctaatgtatttgcttagtcgaacatcttttcatgagcaacgcaatgaatgaattaacgcagactggaaaggagcaaataatcggcgcctatagcgtgcaggaaggacttggagctgtctgatttctttaaagcgaagtagcaggcgacctcgaacgggccaaaagagagccattgttgctaccaagaagcaccgacacggactccggctcgtacaccccagctcatcgtccagctcgtcatccgcgcatagccttcaatgtaatttagagaagttgctgctcgacagtacccggtcatcagcatgcaaagctgcttgctacttggtgtagcgttggcgcttccttgaggctctgcttgttgatgcttggactctctgttgtgcgctggtcaagcggtcccgaagggccgcagacttcttaccaacggcctcagagcgacccttcttacgacagcataagtttgaaaggcaaataggcttaataaagggtcctaatcgggtccaaataagggtaaaatgtcacgtttaagtctatttctgatgtcctccatactaacagtcgaatttgctgttgtttcataacttcgaccctctggtttatagcatctaacgatagtgacgtcgggtcagctcagataaatccgtgccgataccaccttccgataagcatctaaatgttgtttaaccgaggtatttttttcatgttttggccgtgtgagcgattctaaattgtgaccctaacccattcgcagaattaatgtaaaaagtaaagcggagtgtatataagagacgtaaaaactccataaaacggagtctcatgattataggggacttcgtccccaaagataataatttagtatagtactaaattattgcgcactttctgtaacgcgttttatgcccattattggttgacgacgccaccacaaccggcgagatcaacagcgcctggaacacttcctacgcggttggcgctcatgaaactacgtttgtttgatgaaccagaagccgagctttaccctgacgcttagctttctcgatttatcatcttcgtttaggaaatatggcaaaaaatgtcgtgtgcagatcagacaagcacgtctttcccgctgcagaaatcgccggatgatgccgataaaattaagaagtaggatactaacacgtgcgcacctacattctgcatgttatgctgttttcattgctggtcttcttgcctttatacgctaagtacttttgaaattatggacaaatgaaaattttggtggtgcatttcatctcgccaatacaatagtggaataaaatgaagttgaaaacgcaagagcagtttgtgaattgtgaggtctatatgagatttagagcaactgctgtaggaggcgactaccgacttggataagatcgagaagctcgcaatgcaaacttcagcttccgtcgccgatttcttatcctctcgatcttagatcttccaggtgaagtggagcacgacaatcaagacaagaccgtttgatacagaacgcgcgtttatatatactttgggggtagaaagcttccggcggcttcgcatggaggtcggcctggctgctgtttgtggtgcgtcattggggggcacaattggcgaaggcgagctggcatgcatatctacaatatctacttactgattataaagttgctgggcgtgcagcggtggctcagttctgctcggtgatccttggtgcgttcatgtagagctcgtagaggtcggcgcgtttgcgcaggtgctcctgcatggggcccagcaggcgcttgaaggtggctcggtccagcacaagcagcttggtcttgcgcatggctgtgacagtggcttggcgcacgtcgtcgtggatgagcgcgagctcgccgaagaaatcgccggcgccgagccgtgctgacacttcctcgcctccgcgcgtgcacttgacctcgccgtctgcaataatatagaagtcgtcgcccctggatccctccgtgaggatggtgtctcccgactcgacgaactgtacgcgcaaggcgtcggccactgtcatcttctcgtagctcgacagcgtcgagaagatgggcacctggcccaggaagtccaggtagagtgcgcgctgctgcatggtggtggccatgagcacccgcttgaacgtgacgcggtccagcgaccagcactcgacgggcgtcttggcgcgcacggtggcggcgcgcggcgagtcgtacagcagcgccagctcgccgaagaagttgcgcggggatgtggcgcacacctcgcccaccacgcggtcgttcacgagcacgtcgcacacgccgctgtcgaggatgaagaacctgtctccgccgacgtcgccctgcgtcacgacatccacgtcggcgtccacggccacgtacttcatggcgtccaccagcacctgcagcgtgtcctccgggatgttggcgaacagcaggttcctgcgcacggatctccggatcgagtccgcgtcctgcgcgctcttggggttcacggggggcgtccactgctcgttgggcggcggcacgaaggacgacaccacggagcggcggtgcgtgctggtggcgccgcccagccgcgccgtgatggcgccgaagtccaccgagtactcgcggtcctcggcgtcgctgtcgctggcggaggagggcgcgtcctcctcctccgtctcgtcgtcctccgagtccgacaggtcggcgcccttgcggtccgcgcgctgcgtcttgaggcgcttcttcttggcggccaggtcgtcgtcgtccgccgcgtcgcgcgccttgctgtccgcagcgggcgcgagcttctcgccgcagtccttggcgggcatggcaaagctagctggttcgatagtaagttatcaggttgtggggcttgcacttgagtgggggaaccgcgaatgaaggacgacgcttggcgcttgtttttcttcttttattgtcgcagatcttgatctcgtccttctccttcttatgcgtcgccgccggcatagtgggcgcaagtgatttttggtgggctctgatacgtagtggtaagatcgctggcgtggcgcccattcggcggccaatcagtgcgcagcttactttgctgataactcgtttgtctaaaagtctcgcgcggtgattggccgccgggattgaagtggccgaaatgccgatggcgtgaccgcgctgcgcttcgcctctcagctgtatgcttgctactgcggcttgttgctgttgcctgttacctatggttgaccgccctcctccaggacaagaccgagttcgtcgttgtcctaccgtaggcgtttcggggcttttccggtgtggctgagaatgaaaccagcactgctacgtggacgtactaatccaggccaaggaagaacagcaaaggtaggcagtcttatcgcgagctggccaattttggattcctccttgttaaccgtcgcctacctcagtcaacgttcatgggcgataaacgaagacgacggtcggctgcttgcttgctagtcatggaatgctctccgcggagattgatcatcaggtaggttttacttgcccgcttttagctgcggtgcattttgcacacaacgtcaaaaactattatgatggtaggaacgatacgaggcgcctcgtcgtataaaaagccccgcgtctgccggcgcgtggtcacggttgagatggcgtgcgtagcacgaacgcgagtggatgcgtgaggcggcgggcgcattgagcagtgtgccacagatctcgaggccctgccaccggtacattcagctcacactggtgacgaccatagctcccgttttgacgtagaagaaagttggatgttcaagctcatgtcttcatgatcctacagttcccacgaaggcctgcaggtgtccaggcaggaccctagcgacaggttccaagtgcttcctgcatccttgtggcacacgaggagcgagtcatctggggtatcacgaagccatcagcagtatccagcccgccttgcatttgccgatggctgtcgcagtggcgcggtcatggttcattaacaaactcaccgccgagatggaggcaacgcagagcggcgacagctccagcaacaagaaggccactgccgcgacgtcagcctccgacttgaagaccgtctgcagagtgactgctatccagtcggcaggaccaagccaaccagcggacaacaccgtcgacacggtcacgggcaagcactgcgccgacttggctcagcggtccaaccgccttgccttgctcaagagggcgagtctgtccgatatctgtcaagccgatgcctgggccaagcccgcggtggcgggcgtgacgagcgacttggtagcatttgttgcaatttgggcgtttgcagccccccttccagaagccgccgcagcggtggatccgcccaagaagaagcgaggctgcaaggtgaagcccaagaacgcgcccgaatacatggtgcgaaagctgcagccaccgcctgcgttcaacaaaagcgtgagctccgtcgcgaagcgcgtgtgccaagcgggcgccggaaacaccttctgcaacaagtggccgcagacccgggcgctctccgccgtaaaggcgcagacacatcaaggaggccgatacatgttgaagtgaagcttgagagccaacataagttaacgtaccacttttatggttccatgtatccatctgtcctttcattccacagcacagttccatcccaccacgcaggtccttactctgcgggaagaagtccgcgcgccatcatcaccaacactcgaagcgcccaaggttccaggggcggactgagccggatggcgggcgacaagagctgccgccacgtggggcaggccgtgcgcgcgcccgaattccgccgcgagctcaagaagcgcgcgcagctgctgtgcgagggctgcgcggcgccgtcgcgcgcgtctctggccgcgtcccgccgcagcagcagtcagtccctgtcctcctccacgtcctccgccgcctccgcggaggacccgcaggccgccgcgctgcgcagctgggacgagtacgcggaggccacggacctgctcgtgtgcgtgagctgcggcttcgtgggctgcttcagcgacggccacttcagcctgcacctgcagtcgcaccccaagcacttcgtggggctgcagctggccgcgcgcacgttctggtgcgagccgtgcaacctggagatccccgaggacgcgcgcgccaaggtggagagcgcgcgccaggagttctgcgccgcgctggacgagatcgcggccaagaagcgccgccagctgcgcaaccagatgcgcgccgccgtgtcgcccatcgccacgcccaacggctcggcgcacaacctgctggagctcgaggcgcacgcggacacgccgccggtgccgcgcggcgcgctggcgctcgagacgaagccccgggaggacgtagaagaccagagcagcagcaacggcgccgcgctgctcaacatgccgctgcgcaccaaggccagggacgacaaggcgcgccgcaggatgctcaagacggccatgcacaagcgcgagcccgtgcagacgatcagcattccccagtcgagtggggcggaggacgcagcggcgaatggggagcgcgagctgcccaatacggtgttgggcttcacgaacttgggcaacacgtgctacttcaacgcgtccatgcaggcgctgctcacggcgacgcactacttcccagagcacacgcacattgaggaggtgctcgagatgaacaacgcgcctatcacgactacgttcacgtacgctggagctttgagttgtgctactggaactggaaggaggagagcggagtttctgacgccgatggatgtttttgctgtaggatgctgcacgagacggtgaagaagcgcgcgcggaaggctctggcgggcgagtctccgtcggacaagcgcggtaaaagctccaggagcagtcgctcgcggtctagctcctcgtcggtactaaccgtggcgccgctgctcaaggaaatgcgctccaaattctcgcagttccgtggcagctaccagcaggacgcgcacgaactgttcacgagcttcctttgggctgtggacgaggagatggaccctccactgcctccttccgacgagcctgctgatgaaggcacgaaggatagcgttacgaacagcagtgttagcacggtgacgtcttcggagctaccagacgacgacggggatgactcttctcgtcggaatggaacgtggcccgaagaggacgtcacggacaatgaaatgacagaggagggcgagcaagaaacagaggaggaaggcagcgaaagcgacgccgacaactcggagcaggaggagacgaagcagatctttgtcaagacggagacaggagagacgatctccatgcaggtgcccaagagcgcaacggttaaagaggtgcagcacttgctggccaagaggctaaacctaaacgaggaggacatgatgctggacgcgtcgaaggtcgagacgacgcgcgcaacattgtcgtcgcggccgtccgctgtgctccacgcccgagcggagaagcgaaaaatgtattcgaggctcaattttacgcgcaacttgttcggaggtgcactgacgactgcggtgacgtgcaaagcgtgcggtaaccggacggagattgtcgaggacgccttccacctgagcgtgtccgtgcccgatggacgccaccacgagctggcgacgacggactgcctcgacaactttgtgaccgagactcaactgctcgtggaggccaacaacggctacgactgtgagaagtgctcgcgacagaccaaggtgcgcagcgctgccggtcggttcatccgaaagaagcggctcgggtcgaacgctgaaccagagatggaagtcgtcttgcgagacgcctctatgcagatgttcgtatcggctttgcctcgagtcctcgtggtgcacatcaagcgtctggcgcgctctcggaagatcacgcagcacatttccttcgacgagaagctagatataacgccgtacgtgagcgacacgctgcgtcagggaggtggcgacgcaaagaatcactcgttgtgctacgaactcattgcggttgtggtgcacatgggcaacaaacggtcgggtcactacgtggcgtatgtgagtcgctcgcgtcggcgtgaagccctgctgcttcggtcacgcagtcgcctcacgtcagaggatggtgcaactgcagcgcccgaggttctgacgccgaaaaatagcgatggatccacgcgaacatggtactatgtctcggacaccgtcgtcaagcgcgtgccgttcgagcaagtgctaaagtgcgaagcgtacatgctgttctaccagcgccgaccgaaagccaagacgacgccagtttcttctcctacagcagagacagaccgatcgccgacggaaacgtcattgtgaaagaagccggcggcggtcggatgatcagagccagaccttgctatgaggatacccccaaggtataaggctactcaatagacgacactgagagagggatgtgttgtgtgtgtgcgcgtgtgtgttgagcagtcaggggccagcagcagtccaagacaatcgtactgcagctcaggttcaggttgctgttttcggcctagtggtgcgtcgtcacagctttggtctaaagcgtttcgccagtgttttattagcttcatgggcgcgagcgctgtcaagagtctggttgtttgagagttcacatcgggctagcggtgaagcatgagcagcgacgcacacgatgcgtcaagcaccgaggctcaagatgttggcgctgatggcacttcactgagcgaggacaacgaagaggaaaacaaatggcgtcaggagctgaacgacttccgtgctgcgatgggggaagccgaggagacctgcgtgtttctggtggaggacctactggccgcgattttccaggagatgcaagtgcgctcggagaatgcgtccctcttcgcgacgtcagcgcggcgcatgtgcgcacaagcgttcgagagcgtggatatgagcgcattcgagccgtcggactcgctcgatcgaatacctgggcccacgcagcacgaaccaagcgggagacagcagatactcaagccacacagtaaatgggcgccaagtcctcggtctcgaagaaatctcagcccggaagcttcagcattggagtcatcgctgcccgcacctcctccgccgctgttgttcctgcgacgcttatccaactttctcgagaaccgtgcggatcgcgctggcctggagctgcagcgcttcaacttgtcggaggcgatcttgtcgttgactggcaaacgcaaacttttgggcgttgggaatgctgacggggtggattatggtgaatggtgcatctccgtcgaccacgtctctgcgttcctgcaaatactactggctaaagggctcgtgagcgcggtgcccagtacaattcaattcgtgatgggcgccaaccgagaggctttggagaaaaagatgcactctcaaactcgcgtggcactgccacatatccagcaattcgtgcagaaggcgttgctaactgcagaagaagaggaggagagcagccgtgagcagcgcagtcagcctcctctgttccccgccagtaagccgaaagccaaggtcgatagtgaatctacgccgcgatctcgtatcttccagaccgaagtccctttcatcaaggttaacttctccgcgttgttgaagcgcacaatggcgatacctgagcaacctgaagtggggcctgagcaggagttattgagtagctacatggaggaagttgcgcctcgggccattgaaatggaccgtcgtgctcctggccaagtggccacgaaagcagcgctgagcgctgcaaacccgtcgcagcgagccatttcgcgcaaagtgctgttgatgatggcgccatctcctcgacagggaagtcggtggaagacagtgcgtcacaaactcatcgtccctcctgccgatgaagctggagccgatggagtcatgaccataaccgctgaggctgacatggagctccatcttgcgggcgacaaaccccctgtgccagcaccgcctacacatggcacctcggctgagagaaaagcccctggactagcagtgcagaccacagagagcgaggaaatgcccgatgcggcagcgctttccaacattttctcgcttggaacacccagacagctttcggctctggaattggcccgacggaacgacttgctagcccaactagaacgggaagcagcgcgcgctcagcgtcgagcatcgacaactctcatcgcctcgatgagtctgggtgggccctccgtcgggcgtgacagtgatgaggccatgcgtccctcgcaggcggatcaccagcacttccaagcctacgtagccgccaactctgtagttacgatgggggtcacatccgacggacattcgggcgctctgtctcccacacgaccacagcagaacgaccaagcgggtgcagcacaacatcgaggacgggcgaattttgtacgcagcaagttcgagctggagcgcgacactctgccgtttacagtctctgacggcaacgctcacgcgcgggaggagcaggagcgactttcagcggcgatgtgctctcccatcaagcgacccagagcgtctgtcgtagtcccaacacccccacccgagacgcccggacgccccatccagacagcctccactcttgctcacttacctcaactagactcgtcacggctggcggtgggcgtgagcgccgttgtgaggggcgttgaaaagcgtggacctcgaaggaatccaagccgcaagtcgcgcctccagctccacaactacagcgtaagtgcctggtacgacgttgttttatctcaattcttaccgaggtctgacgagttgtgctgtcatttccagacagctttcgatggtgtggatgaccaggacgagactgaggtgagtactggtgggcagatgccgttttctcctgtccggacgtcagcgccgccttcttttgctactccgccatcaaaaggagcactagctaaaggcaaaggagaatcggcccgtgacgttcgattgcccatgattccagtggtctcccctatcaaggcaagtcctcaccggaaacacgtcgctttcaagttccagaacagcgccgacaatgagaagcgcgcctctgaagcaacgccacccaaggcccaagcgcaacggaagcgttcgccgccgaagacgaagcaagcagtgtgggaggccaagacccggtcgccaccccggtcccggaatccctacttcgcctcaggccgcaacttccgcaagattcagcggtgcgtgtacgaagaagacgaggaggaaacgtccagtgccaggcgtctaaagcaggaagagcaagcggccaacttgtttcgacaggtaaacactcgtgctttctcgtgtcgctatcccctgcaacgtcttgcctaacctttgctctgtttgacattggacagccgatggcagctcctcgacgaaacgtgttgcccacgacgtccgagcttgacgagtgataaagctaacttttgggaaacaagtggcactattaacctgtttccccctagtcttgcgggctcttatgttcatcctacgtgtatttcgttgatttcgttgtcggtgagagttttgggttgggtcgaggagcgccttgcatttgcgaggggtgtcgacggtgggctggagaccatggtacgtcccagcaagctgtacgcgtctgtggccgggtgctcgtgcagataggccatcgcgtcttccacacggatcgagtcgtgctgttctcggcccagagcgctgaagatcttgtcgacgacatggcgtgcaacctcaagagcttcgggcgtctgcggcactagaagactagccaagaagaagagccgcacttcgtgtcgctggatgaagccgtctccgttgaggtcgtacgcgtggaagaggaagtcgacgcggcgagaggcgtcgcccttctccagagcactcagtgcagcgatgaactcgggccagtccagcgctccagagccgtccttatccagcacgtcgaaggcccgatcaacgaagaactggtcctccaccgacagctgcgggatgccgtggcgtagtgtttctttatccacgccgtgcgggttcttggacatggagcacagcgccttgaatcgagcccaccgggcgaacagctcagcgcgggaatagccggtagccgccatgagcgcggccaggtcctgctcctggaggaatccgtgctgctcggccactgtaggagttgcgctggttgaagccggctcggatcgggggcgttgcacgggtcgagctttctgctgttgttgttgttgctgttgctgacgagacctgggtgagagttttgtcggcggtggggtggcgatgaacgttcgtggagcagcagtagtagctgcattgttgttagaatgcgcggctctgagttctgctgtctggagtatcttcctgtgggcgtgggcaactcgcgaacggagctcggacagttcctgcttgactggagacgctcgacgagtgctgtcatcttttgatgcactttgaggaggcttggcgaggtgcttgagatgcagttgctccgtgtgcatgttgtacgcggagctgacggacagacgcgagaggttccgctcgggcatgggcttggtgcgcagcagcgagaactccctcatacacgacaagtccagcagcgtccgaccgcgcagggcatccaagaagttggaagcggatcctgcaggggccgtgagggagaaggcagaggagtcttcgacctcggacggcatcgtgaaggcgaacgggagcgtggcgaggccgcgacgacggcgcggaggtttccgcgtgagctggttggccccattccagcgcgctgacagggaagggaagacgtcgagctccgtgtacggcgccggcactcgcggctgtggtggctgagtgtaacctcgagcgaaccgcggcgtcgacgggtgtgatcgatcagccattgcagtgcatgaaagccgccgaccggcaaggtgtggctcggacaacgagcaaaggctctcaacgctgagcttggtgctatctttgctcggcctaaattgaggagctcgatcgtcgtctgaagcgttcgacacttgcccagcagcgcttatagtgccaacagcacctcaactcagcccgtcgatccatgatccttttcaaaggggagaagaagcgtctgcagtacaggagagcgctgaacagttgagggcacagtattggcgtgtgatttcggtggtggcaatcgacaccatcgtcactaactgcttcctcaaaagttgcgaacgtgctcacaatgctggacgtgatgaaatggggcaccgcgcagctagaagcagcagcgtggagctgctcatgggcaggcatcccaatgcgccaacccatatcaaacaccaaagcacccagaagttgtgctcatggtgatggccagcgctgccaatgaggccagaggacagtcgaacacgcgtgcgatgagtgtccgttacgcaccacgtgcgaccttttgccgttcgtcccgcgtggctcgattcattctccatttccagccccggacccacaaagtctccgatagtcctacatacagcacgataccaccaatgcagtcggggctggtgctgggcgctttgagcttggcgctggccgcgagcatggccgcagcggagcgggccgacaagttcatcgcatctcgctcgggcctgagcccctgggtggacgtcgacacgcccgagtcggcctacaacatcacgtcgtcgcgcggtcagacgtggacgctcatcatgagcgacgagttcaacgtgccgggccgcaacttctcgccgggcgacgaccacctgtggacggccctcgagatgcccgacggcgtcaactcggccctcgagtactacagcgtcaacatgacggacaccgtgacggagtcggacggccgcggcgtgttccggataaaggtcatggaggaggagaacatctcgtacacggtgtggaacacgtacgccaagcccgcgggcttcgagacgcacagcatgtactaccgcgcgggcatggtgcagtcctggaacaagttctgcttccaaggcggtagaatggaggccgtggccaaactaccggccacgctgagctccagcaacccggacgtgggcaacgagaaggcccgcgtcaagaccaacgcgttctacccgacgtggcccggcatctggctcatggggaacttgggtagagcgctcttctcccagtccacgagtcgcatgtggccctggagctacaacgagtgcaacgagaagctcagctcgagccaacgcatcagcgcgtgcgacggtagtccgggccacggcctcaacccccaccagggtagaggggcccccgagatcgatctactggaagggggcggcatcgccatctcgacgagtatccaggtcgcgcccgggatgcccgacgccttccgtatcatccctcccgctgccaacgacacgagcgcgtactgcgtctacactggggactgcacgacggtgggcgccaacttccccggcatccccaagaaaacctacgacgctcgaggacacgacagttggtaccaggggctccggtacgcgcccaacacgctctgcgcgcccgacggcagcttgatccagaacccggagacagtgatcgccaacatgaagaagggcatcaccagcaacacgtgtacgggggtcaacacgtgtccggcgtccaaggacggatactcggatctcgagctgattgacggcgaaggaacgagatactggggggtcaacgacgtcggaggctgcatgccggtcatcaacgggtacagtggggccttcctgtgcgaccctgacagctccaacaagaaatgctcgtcacctctcggcgcggaggagtccaagagatacctcatggagccgttcgagtaccaaatggacgccatctcggccaattggcccgtccagctagcggcgtacacgagctacgtcaagtaccaggtcgagtgggtcatggggtccgaggggtacatccgctggatgcttgaggacgtcgtgatcttcgagatcccagccgagagcattgaaaacatgccgcaggatgccgccaagtccaacccgaagaagatgatgctggaggagcccatgtacatcatcttcaacgtcgcgctgtccacgagctggggcgccgtgcctccaaaccccggatccccgtgccgtggtgatggcagcgacgccaagattaacgcgatttgcgacgggttccccatgtacatgaccatcgactacatccgcatctaccaggacctctcggacagctccaccatgtccgtcggctgtgatccttccacccacccgaccaagcagtggatcgaggaccacatcgacgagtacgagacggctgacaacaagtggatcgaagtccacggcggagcgaactgcaagacggaccgcgactgcaccgtcagcacctcgcacattctgacaggcacgtgcaacagcaaaagtcgttgcgtttgtggatcttctggtgcctggggcggcccacgctgcacgatggcgctagctgacactgcgaatggcgagggctttggcccaccgactgtcgtctcgagcctgtttggcgcctttatcatcattgtcttcggctatgtcgtgtacaagatcttgagccagcggagtaagaaggcgatgattgtgggcgctggtgtcactggacctgtgatcctgtccaagatcgagatggacgatgtcccacgctcgaacgcgagcggctctgaggacaaagtggtctagactttgtggaaagaacggcgcgaaatgaagcacagggtcgaatcacaaagagttagcgtgcacgacttccaactaaatattatttgcattccagatagccaacctcttgttgaaacctgttgattgacgagtaccaagagaggtttgctgcgagaaatagctagcagaagcgatcgaaactcaacacaagggcatctagcaagcacacacctgtagcattttttcactcgctccactgggcgatcattcggaatcaccatcgtggaatgtaccggacagtatcttctcttccttgccctgctcttggctgcagaaaaaaaaaaaacgaagttgtcagcaacgagtagacactacccaataaaatggatacgtacttggacagcttcgggatggtcacattgttgtcgagctggttcttcgactgcgccttctctctgtcaacgtttggcacaaagtcgcgatcaggtccagcaaagatgcccttcaaaacacacacacaataaaataaaccacgttagcttcaagcccgccattattctcaacggcagatagagagacatataccgtggcgaccgggctgacaatcggcgcctgcacgaacgggttctccgtggcgttgtctccagtagacccttggaaggcgttccacgtcggctggtgcacaatgacggccggtttttctacgacgaaagtaacacaacaaatccaccagtcagacattatcctcctgtaacaccaccacaacccccacaacatccacgtactggcagccgcagtctgcaggccgtgcagcgactgccgcacttgagccttctcactgagcagctcgagcctcgtgcgtttggtgtcctgccctctgtctaccaccaggcgactctcggagctgtacgtgtggcggttgggcagcgggggcaggaagctcggcacgtgaggtgggagcccctctcgtcgtccgatcttggcctgctcaatggtgttccccgagatgtctctcttcctggccgggaaggccgggacatctctcgggaagggtctcttggccgtctccagagtcttcaccaggtccttaatctccacgggggccggctccaggtcctgcagggcttgaaccacgtccgtggccttgggttgagtgcgtcctgccagctcggcgatgtccttggccgccccgccgatgcgttgaatatctgtaaattatataaagtgtatacatgatgtatacttgttagtgatagtttaccaccattattgcaagtaatatatctacgtacacttggccaggatctccgtcagggcgtccgccgccgacttctgcacggcgtcgaagcccacgcctctggccacgtgggccacgctcatcaccgacaggttgcgcgcgaacaggtcgccgctggagaggcccgcggcgcccccgagcgcgtccacgccgccgccgtccgccttcttgctcatgctcacgctcgtgccgcccggggtggcgtgtggcgccttgcgcgcctccttcttgcgggccgcggcctgcgaagacgccgcgctcttggccttcgtgggcgtcggcgcgccggccgcaccagacgcgggagtactcgcggtgaccattattgttgagtgacaaaatagcgcggtgttcgggtcggtattttaccgaaatttatttccgtaactttaatgtacacattactggtacattacataacgcagtttccaagttgaagtgctgatgtcggaagtgcttggactgtcctctggtcatcggcgatttttgaatcaaaagaaatgtatcggttcgttggcgtgtaaactattattcctgtcgacatgtaaagttggcgtaccgtacttgagcatccagatcggacgagctccgcagcgtacgccgctagattgatgcacgcagaggggtcgtagcatagcatgtttgacggcattgacatcctgcaacattgctgacattgttcgtatgcctgaagtaccgtacgctgtctttattgtggagattgactcctggaccccggcgccgcggtggagtcatctccgaacggatgaatccgccatcgtgcagagaaacctctttctattagttgcaagtgatgaatggcacaatatatattggctgcatttaatgcagatgcctggatgaactgactgtctcgtcacttggagcgcgaagatgggtcgcctccgcaatggtaatttggcccattgggcattttttttatcgagtcgttatcacaaatgcctcactcgatacaacgcgggaaacgacgaggtaaagttgctgcggtttgtttatagccgccacaggtgaaatccactcaagaacaaccatcgcctgcaatctttacccgttgagctgtgtagacagcatgtctagtttaacctagtttactccgcaaacatgttagtgattttcacaacacacttacttacagtcggtgttgtttgcaaaacgcgtttgtatgtttgctgcactatcactagcagatcaaattaacagctagtagctattagctactgttacctgttgtcgaggggttatcctacttttgagtacatttcgcagactttcgagtaatgagtaatgtgctctccgagtacgtaaacttcatttaaactcgtgcgctgcgtcaacttgaaactattgactaaactctaaagatgttgcttgttgggatgctattcgaacacaaataactgctacaaacccttcagggcaaaatatctttttgttttgtgctagattacgcttgaattctatattagcttacgctgagcagtgccatgactgcacatgggtcgatgatagccgtttgggttcgctcgcaccaagaaggagagttcacaaccaggggcgggcggacctacagggggcaccggcccccccccccccccccagattttgggaagacatcacacttaccccccccccctatttctgagctgtcggatcgaggtaccgtagcatcttagtcctaggcgtcgttcactcctgagggtcagttgtaaattgaccagtaggactgccattttttacatatggctacattacacatgactttattattaggctctattccgtttaaaacaaggctttccagcacactcgaaggccgccaaggaacttccgcggcggagcgcccatgaatcaagggaaatgacaagaaaggaaagaaaagcaagacgtacctacgcgtgccggtaagctacgcgcagaagatgaaggttctcggtggtcggctcaaagtctctattggatcttattggggacgctcccatcacacatgcgtagcttcttggagctgccgctgatggagagcaccgcttggtactcgaccttgaggccgtggcctggcgtcaccttcttcatctccttgttcatgctggcccacgtgttctcgctgctgtgggtgcggccgggcacgccgctgctctcaaagaagtgcgcgatgctcacagtctctccaaacaggtgctaacgcgggtccttgctgcccacgacgccagcgagcacggggcccgagtgcacgccgatgcggatgttgaggtcgggcacgccgcagttgcgtcacagcagcggcagcaccgcgaacatgtcggtggcggccgtgacgacagcgacggtagcgagacgaataattagcagtgcaagctaatttgaaatacatgctttgataaatatttgatgtacagtcactgactgcacatcaaatatttactgccagtcagctggtgacgcttgtgatttgcaatcagtgcttgtgcagtgacgcctaggactaagatgctacggtactccactatttttgagcccctgtttttggcccggcccccctcagattttggttctgggtccgcccctgttcacaacagatgaatcgctacggcagcagcgaaaatcactggcgtgcgtggatcttgccgcagggcggagccatcacatggatatgatgccttcatatgcagcctgactagcgtttgataatttcatgcttgtagacgaagagggggcattgatttttggaaatacgctgcgctacctcaaatgccgcagttacgaagaccagtaccgacgttggatacagcaccaacagcagagaattgcaaaacggagaaattgggatgatttacaacggaaaatggtcagaatcgctaagaagattttactggagagctcggtccaatgtactacacaccaatgccgtcaagaatcgctttgatagtagatggttggcttcatgcgccacgtgcgacgaagttgacacacaagaccatcgttttggactcattgaacccgagtgtgaacatgttcagaaattgaccgccaagctaacaactttgcatcgctcgttaatatcccggcaatgggtaccggatcaggatatttttctactacttactactactactaagtacctgctatagctcacgacattgggaaatcgtgtggcctcgagcagcggggaccctggtgtggaaacgaacctagcaaatttttatggctgacgatgattcgagcagacaatggcatgtggttaaaccctcaatggcttgactggttaggagatcctgccgcgcagtctaaagaccccagatttctccagctcctgggaaatgaagtcgaatcaaatcgaccacggggatcttcgcgatgcatgatacctgtggggctgatagaggcggtgaggtgctatcacacacagattggcttatatcacgcgtgcctcacccagtggacccccggttggtcagctatttcatttgagcgcagtatctgtttcgatcaatttccgggcctgatgggattatcgccaccacgtgaaatcactacttggtggatagatgatatctaccttcctcgccctgaagaatggtgggaaagtttccagcgcagctatgagagtcagagtggggaatccctactggtgtattgggtcgtgacgtactttggctcaccagggcacatgatacttgagacaagcgactgtgtttggactgtgaaaataccggcaagccagctagcaatgcgtactgaggcattcgctgtgcagcggcgtagctgcaccatggcagacgtcttccaaacaaatgaacgcactattctaatcgttgttttcacactgaacggaaatgcaccctctatttcaagtaattcgaagtcgtattgggagcaggccctcggcagtgatgaatggattattgacctgccaccagtggaggagcgagacggcagtcaacgacgacatccctgctttgactggtttggtcatgataacgagaacgctcaacaacccacgtggtggactacggttcgacagcagttggatcgccttcagctagccgtctgcgaagcccctaaaggatggcaacggtaccccactatgacgaaaggaagcaaagtatggtcagaggcagtgtcctatactatggggcaggcaaaggtgttgcatgagtcgattttcttgagtacctgggttaccctccgagagtactgggagtacagctgcaccattgatgctaatgaacgatctcaacggcattgccaaacgcttttgagggatgtgaacctgggaatcaagacgagacgtcagcaataggctcaacgaactcaaagccaactgtcccgccgcctttaagaacgaagagaccagatttatgagcgtggcgaacgctggcatgagcaacgaaatcaccaacttggtaccaacggcgcgacctagcttgtttggtgtcaaggtctttactttactggatatatgcatatgacctgggcagcactggcgacgcagtctctgcgactgtgtgatccgtgctgtcatgtatgggcgactaccgtgggcgcgtgttgttccaacatgcgatccgtaggcgaggctgcagcagagcgcagtatcgggtgtagttagccgactaaaccgcaataaatatataaataaatctctattagcttaaatagttaaaagttgtttaactccacaaacatgtaccttttttatttttttcttaatgagaactgggccggtttcctaataatttggttacctgtcatagctttgcgttggtcactttgtatttctgctatatcagcccccgcgaagtcctacatacacttagtaatcttaaaccttatatatagcacttgtgccgattttcgtgaagactcaaatgcataacgtacatgtattggcacttcggactgtaactcgtacgacttatcgagcacgacttaaatcgtactaagtactcgagtacgaattgctataagtcgtggatggtcaaggagcactaagtagtgcgcatatgtcatctcctgcaagatttagcaagctggattagcatccttttggcacttttagaaagtgccatttccgagccaaactggcttcgaaacacaacttgagcaacttgcattcaaagccactatgatttaccactaagtacgaacaccgagggcaaactggttgcaaagcacaatatacgcatgttaaattcgtgaatgggcctcgttctcccgcgagaaaacttctacaagtaagtattgtgctttgcaaccagtttgccctcctaattactgcactagttagtattcgtaaatcatagtggctttgaatgcgagttgctcaagttgtgtttcgaagccagtttggctcggaaatggcactttctaaaagtgccaaaaggatgctaatccagcttgctaaatcttgcaggagatgacatatgcgcactacttagtgctccttgaccatccacgacttatagcaattcgtactcgagtacttagtacgatttaagtcgtgctcgataagtcgtacgagttacagtctgaagtgccaaaaagtctgcaaagcacaatacttagtactgtaactaacagtgatagaggctgaccagcacaacaaatataggagcagcacaaaaccggcaggtttgcacaaagcgtgaggtgggcaaaagctacaggacggggttgttgcctttacttcccgattctcccgaaagtaccgccccccaacacctaacttcccctctcctcccctctcgccactgtgcccacctcgcacgactggcaaccgctctgcagtgagatctccgaacatgatgcggacacgctgcttccgggtatgaaggccttcaaggcatccaggagacagctcatgccctgcaccgcgtgcgcctccgccatcgtgcatttgatgcggtacaagaatctgctgtgtgagtgcaagcagtgcaaggcggtggccccgttcgcgaagtgcccgtggcgtgccaaggtgctgatctaccaagaatcgaagacggtgaccatgagtgagcgtggtaagcatttctcggcggcgaatcctcgccggaagcccactatcacacgggcgcaacgcgcgttcatccacgacatgcgagaacctcacgccgctccacattctgcatacgatgtcgcgcaagtttggactgcgcctagaagatctacctgagcttcgcaaggtgcaaaactgtgtgagccactaccggcgcactaagctcggcggcaatgattccgtttgcgacgttgctgcccacgtggctgcacattcttttaccggcagcgaagccgagcatgatgccgttacctttacgcgcgatacggatgcccgcggcaagtgcattacgggggacggctcggacaagcacccttttgttgctggcgttacgacgaaggcactcctgcgatcggccaactgcgacccggcctccgtcattctgcatgtggatgcgacgtttcagctggaccggctcagctacccagtcatcggcgtcggcctctcagatggatcgcgagcgtttcaccttttggctctcttcgttacgtcgcaaccggaagagaggcactttaccgatgcatttaccgcgttgcggactgtgtacgcgcaagtggctggtgaggcaatgcgtgtgcgctatgtgatggcaggtgccgacgttgctcaaatcaatgccgtacagagcgtgtttgggatcgactgcacgtacacgtatctcatggtttctaccacgtgatcgcaacagtacgggttgccgtgaaggagcgcatgagtggggttcacggcgacgtgggggccgaggtctccagtgatacctatgatctgcacttctcgcttactaaagtggagtacttgacacgcaaggagaaagtgctgtttgagtggaacaagcgccccgagctggatgcgttccgcgaatacatgaagaagctgtggataaaggggaactttagcaactggtagtgctatcttacgcctacggggttcgctactactaatagcccctgcgagaccttcaatcgcgcgttcaagcgtgactacacgcagaagcggaagctcaagcgtgtgctgctgctgcagcagatgcgcgactgctgtcgccatcggtccatggcggccatgccgttcctgcagcggcggaagtcagacaagcccctccaagctcgagcaacgtcgctgctcacgggcgggtacctccgtgagcacgttcatgagcgcagcagcatcgacttcttgatcgacgatactaacgatgacatcttcaacagcacgttgcctgccacaggcgacgggtagttcaaaccgcaccacacacagcatgcacctattcgccaagaacccgagaactcaatcgccgaggtggttctcgggttttgagtaaagtgcctatgttttgatcattttggacaaaaaacagacagagtcaaaaccgcgtagtttgaccagcccctaatccgatagcgactggcgcgctcttacaccgtagagcgcgccagtcaccatcgaatgtggtgagcttgtctcagatgccttcagttcgtttttgtcgaatgcatcacctggtgggactcaacgcgcagactgccagtgtacccaattgccgagtgcctgcaggttgcggttaacacctcacacatgtaacaggattacacgcacaagtggctacagtcacttgtaactctagcagacacgacgtctgttagaggttcgaaagactttctcgaccttggtgtagacacaccaacggctacatacatttacgactaccacgacgggtggtccatagagacttaggactcctattgactgagagcaacatcttctagccaatgagcgacatgcatagcattgtaattctgccaaccagccgatggcagattcctatcttagaatattacatttagaggaagtcagaaacataaaacaaaaatagcagttctcattttaacccaaaacattatttggatcgtttatttagattaatctatactcggaggtccgagtataattaactctaatttaaaccaagctacgcttcctcgtagacgtgcgcacacgtgtaagctaaagtagtgacccaaagtaggcccactacacctggtagcactttgtagtccgtccaacgaccgactacctgagttcatacgtcaccgtacgaacgcggctgagaaccttcccatggatacagaggtgctcatggaaagctccactacgcctgcaacgcacgttgcacgcgctgactgtccccacctgtcggatccagagtgggaggccctgcaacgactgtcaacagtctttggtgaggcggctgtagctacgatgctgcgtacgctaacgccgacagagcaacacggtgttgctctgggtcttatcctgaaggagcaacgcgatgttgctgctactaccgctgtgccgtccgtgacgacaccacgcgcgcaatcgctaaagctcaatgtgagtaactatgtcggaagagagggtgaacctctcctccgttggcttgtcgaactcgacactaccattgcggctcgacgtatcgtcgacccgttgtcgaaggttgccttcgccatgtcatgtcttggcggacgtgcaagaagttgggcgtatggcgccgactctcggatcctacgtgctttagcacgtacgagggtttcaagaaagagctcagacaagcgtttgagccaccgcaaaacgagttccggtcgagggcggagttcctcgacctgcagcagggcaagcatgatgcccatgcttacgctcagagagcacggtacttggtatcgaacatcgtgaccaatccgatcgacgaggcgagcaaggtcgtcacgttcaggaaggggctgagagatgggcctgtgaagacctatctcttccgtgagtacccgagtattctcaaagctgcaattactcttgcaatgcaagaggagtttagcctgcggcaggccaagctgcatgcacatgtgccgaggccacagcaacgcccggtagtgaggacgggaggcccagaacccatggaactctcgagtgagattcattctcactgcaagaaccaaaatgacaagcatgaccttgtcatcctgaacgtgaactcgatgaaagcaagcggctctctccgtgcgttagtagattctggcgcgtcgaagaactttgttcgactgcgaaggctatcaaggcttgacttcgaggatttaaagatacctcgaagtatgttggaagtacgactggcaacgggtgccgtcgtgaagaccgagaagcgcatggtacgcgtgcgcttcacgtatgaagatcaagagtttgtcgagacctttatcgtcctggatctggacgataagtttgacattgtattgggcatgccgtggcttgcacggcatgatccggtcatcgattgggagaagcccactctcgtgcgcttcggtcgcgacagcggaacagtgagcgatgaccctgttgccgctatgcacgcaccgacaggtgcgcgcgactccccactcgagccagcgcctaatgccgctgtcccggagcgccctgagcgcgcgcgagcacgcgcgcaagagcagctagcgtcggtgttgccgccgacagctaatgaaggaaatgtgttgacgtcggaggtcgacacccgcttttcagcgaatcaggaagtgtccccggcctcaaggggcacggctgacgcaggcgagtcacacgcctcagccgtggaggctgacgcgaatctgattggatcaggtctggccaataatgtgacgtaacgccgtcgactccgggaggcgatggattgggtggatttgattcgtcggctcggggagccgatgcaccctccgtaatgggggtctccgccaataacaggcgtcgaggtaaggatggcgtgagagccgacgctgcaggcggtgcggatggttgcaaacgtcccgcactggaaaaacttgcatgctgtcgtgcagccgggctggacgacgaagcgccgggcgaccaagccgggcttgaagtcgctcgcccgcgggatggacccgccggcggtactaaagaagaacacccgtccacggctgggcctggacgaggtcaagaactaagcggagccgggctccgcaaaacaagaagacggcgcatgcgtaggtcgctgcgcaagtctcggcccagggccgagacgctacaagaaatgcctgccgggcagacggaggctgagaagccggacgtcgagacgctgaacgtcttgacgcgtacctgtgccgggttccagtacagggagatgactctcgctaaccctccgacgcaggcgtcggagttgactttgattccagtcatgagctggaagcgcttcgcgcgtgacttgcacgatggacgcatcgagcaaatatgcattgtctcggatgccgagagaacgaagagcgagaatgaagaactgaggcagttcttcatggagagcaccactgaaagcgaggacactctcagcgcgaagactaagaagaagcgctctgaggagcagagctgggactcgctgaagacgagttccttctatgagattctacgggagcacgcggacgtgcttccggaagagatccctgcggagcttccgcaggataagggcatccagcacgagattaatctcgttccgagcacgaagtactgtgtcacgtggcagtggccactgccgcgagagcaggtcaaggcgatcgacaacttctttgagagtcgtcgcaaagctggacaagtgcgggaatcgaaatccccgcacagtgttccgacgttctgtgtcaagaagccacagggcggttggcgcatcgttcatgcgtacaacaagctgaacgatgcgacgataccggcgcagacaccgataccgcgaaaagatgtcatcatcgattcgatggccaggagcactatctacagtgctcttgatctgcgcgatgggttctatcagatcctcatgcgtgagagcgatatccctctcacggcagtgagcatgccgagcggcatgctctgggagtggttagtgatcccgcagggtctgaagaacgcccctgcgaccttcaacaggtgcgtgacgcacttgttgcgctcggtgcgcgacttcgcaccgagctacttcgacgatgtgttcgtccgcagccgagctgcggacgggatgagcgatgttgagatgcacaaggtgcatctccggaagctgcttgcgcttatgcggaagcacaagctctatgcgaacctgaagaagtgtatcttcggggcgagcgagatacccgtgctcgggtgtctcgttgggaagaacggtgtccgccctgaccctgagaaagtcagaatgatcaatgagtggccgacgccgtcgaacgtcaaggaactgcggcagttccttggcttggccacgtacttgtgcaagtacgtgaaagactacgcgggcacgattcgcccgctgtcacacctcctgaagaaggacgccgagtggatttggactgctgagtgtcagcaggccttcgatgcagtcaagcggggcttgacggaggcgccgatcttggcggtggccgaccaagatcgcccattccacgttgtgtgcgacgcatccgacttcgcaatcggatgtgcgttgatgcagcacgatcacgagggccgtgatcgggtcgtctactaccaatcgcgtcagctgaagcccgctgagcgtaactacccggtacatgacaaggagctccttgccatgaagtacgcactcgcgaagttccgagtgtatctactcggaagcaaaccgttcgtggtctatacggaccacgcgtcgctgcggacggctgtgaagtcgccacacatctcgcaacggatggcgagatggctctcattcttcgcagagtataacttccgggttgaatacaaacccggaagactcaatgtggtggccgacgcgctttcgcgtcgacctgactacgccacgacggatgccgacgtcaatggcattgatgccatgcgatcgagcaccccaacgtcgtcactgttgtacgacgtgaaagtcgcgtacgcgcacgacgcggacgcaaagcgcttgctggcctatggctcagcgtcttctgacaaagcttgtcagaagctgccgaagcatcttcgtgccaaaggtgtgcagtgaagcgcgggtctcgatccgacacaatgtcgatcggcatgccatggtgtttgaacatcatgtcaacgaacagacgcgccgtctgtttcgcagtcacttcagcgggtaccgcagcaagatgtaccatcttgctgaagcggtcaacaaagaccacaacgcccgtgttcccctggctgtccgggggaagaccgaacacgaagtccaaagacatggattgccaacactccgacggagtcggcagtgactgcaagggagcctgcgcgaaaacgggttattactctacagtgcagtcgacgataacgcggaccgcgttgtcgtgcccaatgaccatgacctgcgactcacgatcatgtatgagtatcacgatgcaccgactgcggggcatccgggccgtgagaagacatacctacttcacacgcgggacttctactgggcccacccgtataaatgggtgcgcaagtacgaccgtgcttgcgaggtttgtcaacgtgtgaagcctgtgcctttcgcgcaggctcccttgcagtcactgccgactccgtcggagtgttggcaatccatgtctttggacttcgtgttcggtcttcccccggacagccaggggaacacgggcgttgtggtctttgttgaccgcttcagcaagatggtacatcttgctgcgctacccgctgaagtgactgcgaaacagacggcgcgtctgttcgttgacatgatgttcaaacaccatggcatgccgatcgacattgtgtcggatcgagacccgcgcttcactgcacacctttggcaagaagtgtttacacttcttgggagtcaactttcgatgtcgactgcggaccatccgcagacggacgggcagaccgagcgcgtgaaccgcgtgctcgtagacgtgcttaagagctacgctcactcgttccaacactggagcgagtgcctgccgatggcgaagttcgccatcaacaactcggtgcatgcctcgaccgggcatacagcgttctacgtgaaagccatcaggcacccacgcctcccgagtctactcgggatggtggctccttccttaagtggggaaggatctacgactgcaacgcagcagccgcagaatgccgctgacactggcacagtgtcagccgcgactacgcgcacgaagaacaagcagcacccgtctgtgcaggacacagacgccgacaagagcaagaagaagaagaagaagaagaagaagaagaagaagaagaagaagaagaacgggtctgtgcagggcgcagacaccgcgaagacgaacgcagaggccgggcctactgctagaaacgagctgaacgagttcagctcggacgcaatcaacttcgtgcagcgcagacaagccgtcattcggtttgtccaagacgctattgcagcttctgtccaccgacagaagctgaacgcagacaatgttggtaggggcaacactaatgaattcaagaagggttcattggttttgttagtaactcaaaacctgcctaaacatgcaatttccgacttcggggcgagcaagctcgctccgcgcttcatcgggccggtcacagtgttggcacggcatggcaacgcctacacgctagatattacatctagcgtgcgcctccatccgaccttttacgtcggacggctgaagccatgccggcagcacgagccacctagctcggctggcccgaagcggaagccccagcgggagcgaaccactgctccagcgcgtgaacgcgctgggccaagcgtgcgacgcgacctcccacgtcaacagagatgtccgacgtggtctgcgaaccctgagcgacttgagcccgtaggatcgccacctcctgcttcagagcggcgaactcccggctctgatgccgttccacagcagcgacccgctcctcgagcgtcgggccaaggtcaaccccaggttgaccatacccggggcgagttcccaccgccgccgcctccgatccgcgacacccgcggctcaacacgctggattgttgagcgtattgtgaaccatagtatcccaaaacgaactggcagccggttcgttatcgtattcgttggagagggtttccgccccaccaagatacatgggagccgcgggacgtcctgctgcaggacgttctggaaatggtgagggcgtacgaagctcaccacgcactaccggcgcgaatgtagtgcgagcgctgtagttacctgcagcgcccggagtttcgcgatcgtcgcgttcctcgcgtgccaagaactcgacacggagatccttgagactcgcaggtacacgaatcgtcgtgtacccgttttggtcgcgttcgctcaagcgcgccgcacccggaagatacaacgtgcactgttggccttcgggcacagcgcatcgaataccagcgtccacagaggatctgtggagctgccccagcctcctgcgcgtcgaaaatgtctcaaggcgttcacgggcatgcttaacccgctcgcagtaagcattcggcttcttgttgaagttctcaacaaaagcgttccaactttgacaaagtgcctgccactcaggcactttgctgcgagaagaagtcttcttgtggagaagtatcggagctcgtggaagggcccgatgtaataatcgcgcctttgattcgttaacggatcaaagtgctgctcctccgccacagcatcatcgtggatcccgctgcatacgttcagcggaatttcatttggaggcacggtgttgcccacacggtctgcgatctctgacgcagacgacatccacggatcgcgcgctgcctgagcagcgcgcggagagcttgaaggcgccacattacgtggagagcttaaagccccagcagcggagagcggagtttcgctctcgccgcgcaaacgcttcgagcttgaagcgtccgaatcgtctccttcacgagggcgtctcgacccggcatgcgggtcgagactatcactgtcgatagacatctacactatcctgaatcagtgttggcgcctcagagtagttactacactccaagggatatggcgacggcgttgtttgtatcgggacccggtagaagatgcgacggcaacacgggcggctgcggtactacatagcaggcttcgagcggcctacctgacaatcaggatcaacaccacggcaatgaatgcgcctttgcctttggtcgcggctgcacgtgtctgtcacttggcgttgagatcgccctcggcggagacggcacatatcccccatccgactgttggtgccaagcgcactttgctattcttcgacggtggatctcgcggaaactcagggccaggcggtgcgggaacggtcattgtgcattggacggggcgacgatcacgccccgggtgatgtggatggctagcgtctcttacgcgttaaagacgactaacaacatcgctgaatatcgtgggctacttaaccgactacggtatgctgctaggtgcaagctgttgggagtacacgtcgtcggtgacagcaatctcactctcacgcagttattgtgaactccggccaaatttcccaaatcgcggcggttcggagaccccgctccaatcgccaaatacaaaactcaagtcgtttgcctaatctcccggcccaaaccatatggttcgcatgtcaagcccgattcgtacttaaacgggcgcttataaccaatcctagtggccccggagattggccggagatttggctcgggtggttcaacaaaccgcccgcggaaatttggaacagaacacacaatacggaagcggaaaacgcctcgagccaagcacctacaagggctgtatacacaatgccgactactagcggatcgactgatgatgtcctcctggtctcatcgtttacgccacttcaacaagacggcggacggattagccaacctggccatggacaccaagaagagcacgcaggtaaccgctgcagacgtagcaagcctgccttcgcgctgggcatcagtcatcgcgcccctccaagcgtacgtagatcactggatggacactcacccggatcaggaggacggatgccgggcctccgctcgtcgtggcgcaccttagctggtacgcatttgctggcaccagtagcggtaactagctaaccctcagatgatctgtaagcatcagagggtcaggcattttctaggtcgttagggactctaaatgactgtaatgtacatcagcttaaaacgatacgaaacgtttttgtcgaatgcagatcatcatgttttcgttgccgtcatacgatggaacagtgaaccatcaacgttgttgctatctacagtacttacttaagtactgtacagtatgcattgcaggcactacgctttttatgagctcttgtgacgtgctggcggagctctggtactcctccacaaggcgggccaccaattgcgagagtatgtcagcagcaacttgctgttgttcacaagccgtaggttgcgttaggactctgtcgttgactgtacagtgccaattttgactttcctttctcacaatgcatagcgtagaaaacgaaaggctccctccatacaactttgaagataacactttgcgtgatgagtactgcaaccagtgatctcatcaaccatggatctcatcaagtgataccgtcatactgaagatgctaaatgggattggttggtcaccgtatacttacttgggtgtgaagtttagggcacccagagccgaactgtgctatgactgccactttgaaattcgccgcccaagttgcaggtagtaccggtaatctcatttccaacatgccggccgactcccaacggtcctgcagcgccaaattgttggtcgtcgtgattgctctcttagcatgcgcctgtgggctctcgggggcggacaccaccatcgccaatgttgctccctcgtacagtcttcacgggcccgatcaagctcacggacacaccaagcggcagctacggtgccactcgctgctagcagtggatgaagatgctgaagagaggggaatcgccaacaaccccagcgttgcaaaagttctctataagctgacgccgaacaagcaaaaggctgctgagaaactgtttaaacggctcaaactcggcaaaaacacgcccagcattttcacgaatgccaagtttctgaagtgggagaaaactgtggccaagtctttcaagacgaaccccgaagcggcagacatcgtcatcttgtcgcccctccattccgaggaaagtaagtcctccactgttgccacagtatgacgcgtgctaggcacttccatggcagcgaataccatctttacaagagcttcatcgctgtagtgagcgtgcagcgaatacgtcatcgcctgcttcaacaacctgtcgactggaccctcatttctccgccggatgatgaacgagacccagctgcagaattccggccggacgaatatattatcgtctccgcggtccacgaacgagacccatctgtggagttccggactggtcaaaatgttgtctgctacgcgttccagtccgaggagcttgagtgcgtcggctgccgttttcccgctgctaccggtagcccagttcgagagctgggcatcctgcagtcgtgcagcaatggacttcgtggacgaaacttccttcgccgcagctagcatttttactagggcttcgtctccatagtgagctttaatcgttaaatggagtagagctgttcaagctttttcaattggacgaggccggagacacgattttccagagttccgccttcagcaactgggcctcgtacgtttccgagctgaattcgaagcgttcaactgacgccgtgcttagagacactatatcagtgctgctgaagcggtttgaggagccggatctcgcaaagctactctttaccgcaaagcacagggcagtacgcgacgccgaaataaatattatcagcgatttacagagactacagttcaagaagtggcaagagcaaggtgagagcactgaaagcgtggctacaaggttgctgactatcggtgctgacaggagaaaccgaggtattattggcgattacaacaactttctcaaaggaatcaaatattagtggcaccctaggacgttggcgagggtggggaggaaaatgaaaatggctttatgggggcgctagagccaatttcatctgcggatagttttcgagagccaaacaagactacttcttagtacttctctggcccacttaagaaacaacattcggcattaaacctcaattcgatgtggaccacatgtcacatatgattgggtataatcaaccgtttcatcttactattggccaaaataaaagggtctgcgcatgtcgagataatcgcgtagaaaaacctcaaaactgtagcccttctaaggcccgttctcaaccggccgcatgcggccgcaccgcatcgcacggttttgtacaatgcggccgaattgcgcgccctacccgcatgagcttccagatgacatcggccaattcgaactcgaaacataccaaaagcagcaacgcgaagtatgatgagttttgccgaagactcgtatttctcgatgctagctcataccaactgaaaacaatatatgaacaagtacttgtacgcctgtagtggattaatgctaaatacgtatccgacgtaccagtagatgaaaaccaaacagcaagaatgcaaggcaactcacaaaaactgtaatgaaaacggaaactcgttaaaatttctaaatcggccatcgattgtgaagctacacgcgctctacgctaaaggaatctattttgctttgtgcagcaaaagattacgcacttatttttcttcattatacaggtggggttaacttccaagtagtttctgtaggataagttgacgatccactcattgagcagctccaccatatcgctgtaggtggacggtttttcttcacactgctggttgaccagcgtagtagatctttttgtatcgctttccttattgttgtctgcgccaggtttttgctgaagatgtttgcaatatgcagaaacacaacaagtttttcgacatactcacattttattttagtgctaaacctctgttgactcaaataaaaagctctactgatgccacctaaccgtgcctttcgcctcagcacgccttcgccgatatcgtgcgggcatggaggtatacgttagctcgcttgaaacgttcaagttgaaagcccaaacatcatggttggctgtggatatgggctgtttgtcatcataaatcaagaaaagttagcaaggtctcgaatgcataacaacaatcatctccataggcactgcagccgaattgtttgccccctatatatggtatgcacgtgctggtaactgtcggcagcagtcgcagctattaatttttatctcacggtacacgataacatttaactctcacgcacacgactccgtcaaccgatgcatgttatgactacatgtatattggctgatacataacttccaatcgtagggcatgaaacgctagtgcatgttgatctacgcctgctaaagagcaggtagacgtagtacacgcttcccggcggtgggggttctacatctaaaggtagtttccactacctggaacatgtatctaagttacttcgaaatagatgtaacattacacgttctgtacgatgcactcaataataacacgaaatcgtgtacatgtatgccgaatagagtagcgggccccttttgtgttagcgtccgctagcaccagcggcccgaacacctcgagtagaagctaaaatacaaggttgacttctttggcagtcaaggagtcaaattgacgccttgtcggctgttgtctgatagggtactgtacagcaggtgagtcaataagagcgctctgattggtgctgcggcgtggaacccctactcactctcgtgcggcaacttcgccgcatgcggccaacacgccgcatgaacgcctatttttgcatgcggccgcatgcgaccacctaccccactaaccaatcacaagtccttatttcggctcatgcggcctcatgcagcgaggaattccagttgagaacgggcctaactcgtctccaacagtcgaaaccgaacataagggtaaagccgtcactcacgattacggtaatattttattggcacttgttgctgcacccgtctaccatatggtatattgaggcgaggcgggtgaacgccttgatcgtccaggtgtatagcgcactatgccggaccgaatcggttcggagtaccagagatatccgctgcaatccggtagtcctcggagcacaggatgtgaaccgggggccgggaggatcgcttggacttggcgtgtgtccttgtgtcaacccctataggtatcgtttacctttggcggaccggacttcaccgagtgagttgttgtaaatacagaatcgagtctgctgggtgtgttcctgaaacaaactacaccgaatgaacagaaagtcagaccgaatcgaagggaccacagtcagatccacaattcaatataaccaacacacagaaatacaatgccgagctaaacgtcacaaaatatacagccaccacttattctttaagacccttgggtggggggtctatacgccagtcaacttacgagccgtcacccaaggcactggtcaaccctggatgcacactcactcacgcgcaccaccctcacagaatgagggaacaatacaaaatataattcagtcctatcacacagtagtcaatcaattcggtctgggggggtgactacctcaaccaccaaagacacacagtagggaatatgaaatggatgcccggatagagcacgcaaattggaaagaaagctctcacagatcactccagggcgcgacaccccagtccctgccgactttgccttggtacctttgagtccccactacaccagtgctcgcaacaccagtgaggccttgaaacgtcctccgttttaagatcgcacgaaggcggatcccacgtataagctcttgaagacgtcaatgtcggggggaattcccagcccgaagaaagacgttcgcgtgttctcggcaaattggtttctgtttgatcttacgtttggctagctatctgtttcacttcactgacttctaataaaggtttcactatgcttgacttgtcttggatatgcttcgaccttgtgcacgggacttcgatcttcttgcactgagcttgggtatgcttgacttggcttggttatcgggcaccttgtcgacgtcaacgttccttcggcaacactcatcatctggcgtcagaggtacgtgggtacggcgtctcatcaaatccgcactggacctctgcgtctaatcacgtgagccatcctgtgtcgcttgacgttcttggtcgatccggtccttgattgctgctacacacacagcagtactggacttgttgttggtgcggtcacgatccagtatgggcaccaggggtcagaccgaattgatcatccggtccggcctcattcagtacggcaccttggcctccggtgcgtcgctaccgggtgcaccacgatccagtccggcaaacagtgtactttgtccagcgaggtcttgggagcatgggagcatggtgggcatggtgaacttgggggttggtccgatgtcttgacggagtcaatgcaggcagcagccaggatacgttcactggctgcacttgcgcgccttaggcttgtcctgcggtcagggaagtcggcggacggacaggatgtgttactccacaccgaatatgagcgctcatccggtgggcacatctccgatcctgtgagcccatgcttactgcaagcaccgggccccgccaaattcaccatgcgcatccactatccacatgtcacactccacgtcactggattcctgttcactgcgaccagtcacagtcaggcgaagggtcgtcccatcccagcggtcagacatgggtgcggataaaaatcattccccacatcgtgtcaaccgcccctctgctcaagttctttcacagaggatcttgccaccgaggtgacaggacatgaacagacccacacacgatggatcccactccggatggaagggggtaccgaatcgcaaaaccgttgaaaggctctttcccagaactcaagtcagccatcgtctcgtctccgtagcaagtctccacacatcacaatcaaaccgtcgggagcagccggcttcacgtcacaatccattttcgatcgcgagactcatcaccgccatggaagaggtcggcgacaatgcggggacgcctggcagcggactaacgggcccggcacaacctccgcacgcccctccagctggagagggcgctgcgggtgccaactcgggctcaggcggaggcgccggtgaagcgcgcggcgagcgcacgtcttctggcggcgtcaatcaagttgatggcgacgtcgagatgtccagcgctgacggcaaggacgatccctcgcacagcaaggcgccgtcgggggcgtctgacaataacagcgacgaacacagtgggcgcatcctgaagaccgagggcgacacgatggaagagcgcctgacagccatgcaacgcagcattcctgggcgcgtcctgtccgtggtcgaggcgctcaacatgcctgcgggtagcggccttccggcgcgacgcaatcctgcgccaccatccagtccgggcatgaccgcaagctgggaggcaccgagtgggtatgcactggatggcgcgtttcgttttgttggggttcctgctcacatgcgtcacctcgaagacgaccgctacatgcgtgacggatacgctggtctcgaagtgctcaccacgatggaatgcttctcagcgacggacctggcggacctgaatgagctggtgggcgaggccaaggacgtgaacgagttatttcttcgacctcgtaccgggccaccacccagtccgaccgagttggaggcgctactcgactctgtccagatgcgtcgtgagctggcatcaaccttgtcggtctacgatcctcacgatctggcactgcgtgcattcagtatgactacgttcatgcgccgcttgttgatccggtaccggaccattcgcggggagatgcaggcgaccgggtcgtccacgatcgagaagctgttgaccgcccagaaggagagctcccagttcgaggctcacgtcacgcggctgcagggacaatggagagctgtctgcaatgacctcaaagagacgaaagaggcaacagcagcacggtaccgggcggacttcaagaaactcatggcggaacacgaggtcgagaaacaagcgctacgagaccgaatcgctgccttggagttcaagctcaaaacatccagtacctgggtcgagtccctcgagtctcaggtcttcgacgtcgaccgcatgatgaacttccttaacaggaaccagactaaggtgactggcaactggaagcgtctggaggagttgttcaagcaccaccgatccggtaccacgcccccaccgaatggcagactctgatctcagtcacctctgcagatgacgcattcaccgatcccgggccgttcgagttccgacacgacggcgacaccgacacggaagagaagggcgacgacgggtctgaatcgagtgagggcggcacagggtcgcggggcaagcgcgtcactatcgtgcatgtcacaggcgaggctccacccggtaagacttcctcgtcagaacgtcgatccagtggtggcaagcgtcgtcacaaggcggtggctcgggtcgtgaatcgcccccatagcctgggatcccaacgaggaagatgcgcgccccatggatcaagaatatccagtcgatggaaaccttgcatgcgcttcactcgccgggcttcccgttgtgtggcgcaagcttcggacggatcttcagctgaccatgtgggctggattgacgtactcggaagccacgactctgttgaacagtgacgaaatggcccatcacttgttccatccttacgatctgtcctgcatgctggctcaggtaatgtactggaaccaactggacaaggcttattggacaacctacgtgccagaacgatacttcctccgcgcggagagcatactggatcgctacgcacaggatggcctcgaaccggatcggtggcccgaccagatggaccccacacaagatgacggtgagctgctcttggacgagaacgaagaggacgttgacaacgaggatcgtgatggtaactgggaacccagcgaggaggctcaagccaagatcgaccggatggaagctcgtgaggcagcagcacaacaggatgacacggaggtaccggacaccaacgctgcactggatctcgttttgccttcgactcgtcgtcccaagcgcagggctagttcggtgtcatctcaatcggattcagccaccactggatctggcaagaaacacaagaagtctcgacctggtgatgagcgcaagaagtctccactcgctcgcaaggagatgaaagatcttactcctgaagagctgaccgtgatcgaggaaccgggtcgaggcatcacttcgtggcgccataagggcatcatgaccacttttgcacccagtacgacttacgccgtctaccagtccgcaggtttccctgactacgcaccgaaccacaacggcgggacggggccactcaaggatcgcttcaatgtggacgagtaccgggcgatcatggagacccgaccgggcgagcggatgtacaagcgtcgtgtcatcaacctcctcttccacaagcgttacgccttgggagtgaaggtccacgtcgtgctgaccaagatcgtgaagttcatgaaggacaacgcgctggtcatctggtacgcgggacactgggtgacgtatccggaggactcgtcgtatggggtgaaggagaaaaagaaacgcaagggtctgcatgatcctgccattaagaaatacgccgagttgatcaccgaacttctgaaagcaagaaatacgccgagttgatcaccgaacttctgaaagcaagttcggtgatcaactcggcgtatttctgggtgtatcctgcgaaggtctgtccctggatcctgtttgacaagtccgagaagaaaccggatgggaagccgtacacgatggccgagcagctcgaaatcctggatcgcgaagaaccggctcgcatccagtggacagggtggaccctcgataggatcatcgcggatcgtccggcgcacatccggaaaatgctgctgtctcccgatgagcgtgccaacaactgggtctgcgctgatcaccgtagctagttgcacactcggtgtagccacaagctaatctccacaatttcatgtcattcacgttcatcacctcactccttcgtcttagtcttatgtcattcggtccgtctgctcgtcattctgtcgctcactccattcaggggcgcagtcactggtcgattcagccggtatcttcatttttccactactccactccaattctccacaaattcagcgtcgacagttcacaatcaaaatcacattcagtttcagtcaggtcacacgtcggcggtcaggatcgagtgttcaatccggtactagacactggggtggtcatcaccagcctgcatagactggaacctggccttagcacgggcactctgattgaattcatacaaaagcgcaccacaattgagcctggtcactggtaaccactcaggatcgtcgtatcctttccacttgatcaggtactcgcggaatctcttggaagtacgagtgcgcttggcccaccggaggtccagaatcttttccacttcgtactcatcattctgttcgtccggctcccagctgtcctcgggtagcagggctgcatcgaaatcgtcgtcatcatccagatcgagttccgcggtaggtcgcttcggaaacagagcgcgaggcttgaggcggctgatgtgtacccaggggttaacacgatatcctgtgtcctccaccttgagtttcactctgaagtcatcgtgtacctcttcgatcttgaacggcccatgccacatgtgagccagcttgcggctcaatccggtctggactttcgggatgtagagccataccgaatcacccttctcaaatcctgtcttcagcctctcggacaattctctccacttgcgtgtctgttcttccgatcgtgttcgcttcgcttgtctctggaggtcctcggcacaggctattgcgtagccgtagtcgcgctgaaatttccgacgccactcgtacgcagtgcgttcaggcacactggacagtttcggtcctaacatcgccgacaccgtgccttgcgcatcccaaccgtgtaccagatagaatggagtgtccaatcgggtcgcgtcgaacgaggtgttgagggcgaacatcagtcgctcagcgtgatcgtcccagtcagactggccagactcagcgatgtaagcgcggacgctccggatgacggtctgcaccgaacgtttctgttggccgttcgcttgaggacgatatgccaacgtggcgcgctgacgactgccgagtagctcctgaaaccgagtgaagacctcactcatgaaacgtgggtcttgatcgtgtctgatcatcgacgacgcaccgaaattccggaagactcgctcttcgtaggcctctgctacatcctgtgccgtagtagacgacatgggtttacacatcacgtaaccagagaatgaatcctgaaaaagcagtaggaaggtgttccctcgtgccgacttgggcatatgcgtcacaaaatccatctacacaacttcaaacgggcgcctgggctcgatgttaccaggtgacggtccagggttgggaggtcgcccctttccacttgcacagtcagcgcactccttcacgaaacgttccacgtcggcatacatgccgggacagtagaactcggagcgtaaccgctcgtgggtgcgggtaattccctagtgtccaccttgaaagtccacgtgagcgtaatgcagcaagtcagcgtgcagggtttgtggcaccacaagacgtggctcatcctgtacgtcccgagatcgatctcgagtagaccgcgcgagtcgatacaggatgcgtctggcatccagtgcaaacaagtccgagagcttcgcgatcttgcgaagccgcctcggagagaatcgatccaggtcgccactcagatacgctttgacttccgaaatgaactcatcctgatcttggtgtgccttaatcctgcgccacctctcggcttggaactccaatggacccaatgggccacttgactctgtctgttcctgtgttctcgatctggtcaggaccgccatgactcgagcacagtgaggtaacggagcagaaccggggtcctgttcgacatcgtctggtgaccccacatccggtgtcaccaccttcttagcagccgatccatctggtgcatcctgaactccctcactcacatcctgcgccacaaccactggcttcatcagcttttcgtggatctttgacactcgctgcagatggattcgttcctcctcatcctggacagtccacgtgatacccagcgccagcgtcttggaggtcaggtagtccgcggccgaattgtattcacgtttcacgtgaacgagccgaagcgtactgaatcgtctttccagagttttgcaccgagccagatgtcgttgaaggttgggttggttgcagttaatcagcccttggacttgttgtatcacaatgcgcgagtctccaaccacgatcaggtcttgaacgccccgatccagtgccatggtcagtccattcagtaagccgtgatattctgcatcgttcacagtgacatcactcaggatgaaaccttgtgcatccagtacgctccaaccaggcaggctccacaggatgcatccgcagcttcctcggcgagtcgacgtcttggctgctccatcgaagcttgacacaatcccctcaaagtcagcgtccaacatctccatgctcaccaccggtggtggcttgacccgccgcttggctggaatcagcgactctgcgatccggtccaagtgctctcggggggtgatacccgcaccgagtatagcggctagaccgtcttcatctcgctgaattcggcgaacttccaggtcccactcggaaagagtgacgccccatggtacgcaacgtccatccgccgacttggactgaatcacccacttgagtaccgaatagcgggtgtacacgattatcgaacatccttccaggatcgtcctgaatacattcagtactctcatgatcgcgatgacttccttctccgcaacgtgatatcggacttccgagtcattcagtacacgctccgtgaaacggacgggctgaatcagcccgtcatgctcttcaccgaggactgcacaggctgcccactggctcgcgtgaggaatgatgacgaacggcttggtccggtccggatgacgtagcaatggggtcgacacgatcttccgcttcaggatctcgaacgcttccttcgccctcgccaagtccctaccggatcgcacttggtcgtcgctcagctcgtacaggactgcagctaccatcgggaaatcctctatgaacttatagtagtagttcagactgccgaggaaggactggatccccttcagagtagacgggaatggtagatccagtacgccctcagcgatcttcggcgtcgccctgagtccttctgcactgatctcatgagagagatacgggatcgagcgcttaccgaattcactcttcggtagactgacagagatgttccagtaccgcaaccgaaacagtagcgcatccagatcgatgaaaagttgatcccacgtaggcgccccatgcgcgatgtcgtcaatgtacgagctccgtcctaggacagggcccatctgcatcggcgccgggatgttacgttggaacacagtcatccggtctgtcagcgcgggtagacgtcggccagacaggatttcgtcgtccgatccggtgtcgctccctgcgacgttgtcctcttgcagcttcaaacccagataatccagtacgtcctgatccacctgagcttccttaccaggtggtagtcgaacaaagccccacagacagttgttgagtatctgctggtacaccagcggagcattcttcagaccaaatggcatgcgtcgccactggtagtgaccgaatggcgacacgaacgccgagatgagcttggctcgctccgtcatcctgatcgcccaaaagccgctggccatgtccagactcataaaccacatcgcgctctcgaacccgattagcaggtcgtcaatgagcgagagaggatagttggacaactggatgaacccgttcacgatccggtaatcaatgcacatccggatgtcgaccccgttcttcttcagtacgatcacgatcggtgacgcccagggtgacgtagatgtctcgatcaatccagtttccaacaacttcttcagcaacgcgtacaccttcatcgcaaggtgtggcgcgaccgagcgtgccctctgtgcgacaggcttagcgtctcccacatccagatcgcaaacgactccgcgagctggggctggtgccgcatttccatcacctaagaagatacttcggtggtacctcaggatgccacgtaatcggtgttcgtcatccggcgtgctcacgccaggttcgccaacatcagccttgtcaatgtcgcactcgggacttaaatcctgcacctccgggaggagtgcgagttggtctcgcagctgggagagcagatcgctcctttcatgaatgtacacggctggttcaaagtccaactcctccacacttagtcgcatgacccgctcgtactcttctttgagtttctgcaccggagtgcagggcaggataccggatggtaagtcggagacatcctcgtcggtcacatctggtgcgtcttccgacacttcgtcttcatccggtgtaaccgcgccaaagaagtcctcgtcatctccatcctgtgcaacatcctcatccggtgcgacagcctcgaaaaactcttcgtcatccgtttcggtgtcactggtgaagtcctcagcaccacccggagtcgcactagacttcacagtcgggtccgtctctggttccttcgtcagcggtgttatgcgcttgaagctcggttctttctcaaccaggtcctccactaccggatcctcaccgagttccacgatcctgtccgactcggtcaccggattctgcaacaccgaggtgaaacacgtcacgtccttcttcccgtccggatgtagcatcaacttggtcggccatgagtacttcgcaggctccacggcgggcgattcacgatcccagagtgcttgcagccgacgttgtttcctcagctgaccctgtttggacaaggtgttctcgtagatcatcacctgccaccccttgtatgccctcgatcctggacggacgaaccgtcctacggtcgggaagaatccatactccacaacgtaggccagcgtggtcccggccacgatccagagattgttggacgagatgtttacgaccttgactgcctcgggccaggacttcgctccgtacacgatcttggtcacccagcgatcaccacgtccagcccacaccacttctcgctgtgggttggcttggccgaaccggatgcgcacaacagcctcctcaccgggtcgaaggtacagggtctccggcgcttggactggcaacctcattccttgtcggcgttgcaccttgtccccgtacatgagcacaggctcttcatccggtaactgcagaagtccttctcgtacacacaaccgaacgccggcacagaacataaagttcatacccaatagcacgtccacaccttcaccgatattcgcaacccagatgtccatgacgtacaccactctcgatccgagcgtgatcttgacttgcgtgctagcagagatgtaagtggttttgccacccagtccggacaccttgatctgtttatgccggttgggcttgatcttgagtctacgcgcaagatccaaactgatcatactcaccgacgctccggggtccaacaaaatctgcaagcggaagtcgttcactgcgccatgtaccgtagccacctcatgcgaatccttgtctggctcatgatcaacccaccatccataccgctcacccggttccagccgaaattcggtcggtccatccggtgctcgcaattaggaacggctcaatccagaacgatcatcaacttggtcaggctgaatcgggtcatcgttgctcagagaaatcatgcattgttggttatcttggtggctgatcctcagctctggtccgacgtaggctaacacacacaattcaggggccttcagcccggcgcgtactgggtccccacccagcgggcttagtgtttgacggcccccctgaattcgccttgtcatccaatagctgacccagtaggttcttcggtatgtccttcagtgctccatcttgtgccagcttcttcagtgcttcgatggtcttcataagttcacacggtccttcatgaaatcgttcacaaatcctgcacgggttgacattgcacacgcgcatcgggtgtccgcgtcggtgacagcgatcacacacgatgtctatccagcaattctcctgtcggtgtccaggcctctcacacttctcacagaattcattccaatcaagattgcttcttctcggcgactgcggcgcggagggctgaccgaatcgagacgcccctgactgttggccaggtggcggcggtctctatctgagcccgtcatcaccctgaacactgcgtcacgtagtacaccttcatccagcactggcggtaccaggtcgggatccaccggtcgtgtcgaggcaggagggaccgagtcgtgctttggtgcgacctcgactcggtgttcatccacctcgtcttggaaacgcacatggcgatcctcttcgtctgattcatcctcgctctgaacgacgtatgcgcggccaggacccttcggtctgaatcgctcgcgttcgcggtctcgatgcacgttgcccgcgcggaagtcgcgtggtctggatgccgagttctcacgtccgctgtcctggtgatcgtcttcgtattgacgcagaatgaactccaggtcgtcgatgctgtgcagacgctggctcttcagactggatcgaagcttcgactcggtcagcttccggataaaacgcttgatgtgcatctcacgcgtcctagatgacttcttgaactccacattcgccttgcaggcggccgcattcagtcggtagaagaagtcaagcgccgattcagtccgtccttgctcgatcgtgtagtacctctccgagtcggacatcctggaccggcagtacttgcgcttgaacgcatgggatagctgggtccagtcgtctcgtacatgcctcggcaattgtgcacgccagtggcgagcgcatgtaggaagcttcaggcgtaactcgtacaccttcatgctgtgccgtccaaccaccctgaacggtcaaggggaggaatcgctcccaccatcgtgtccactcatggtacgacgccttgtcgtcgaagtcttccagtgagtttgagttcacgtacagccggaagttcatcaccgtcttgccgtccttcgtcgtcatcgacgtggagtgcgtgggcacgttcgcgagcgagtcgtcggagtcgcttgagctgtagccctcgtcgtagccgtcatcagagctcgagtccgggtcggatccggaggggtcaccacttccgcgaggatggacgcttgcgcggtcctgacctggtgcccttcgcatccttggcaggctcctgcttcacgggcaccttcgcgtccttcgcgggggcatcctgcttgtccttcgccggcgcagcttgaacagcgcgcgccttggctcccgtggttgctctcgccttgagaacgctgttgatcgtcgcctgaagttgggctgctagaagctcgtcggcacgcggcgtcgcagactggatgggcggctgaccagactggataggcacaatggatactgggtgcaatgtctcacgcccggtctctgtcttcacatgcgacaccgaatcagatcccgatgttgcttgagccgctaaattttcctggcgtgttgcacgaaggttgtgtaactggtgggcctgaaaccgctgaatgttccgggaagattctcgctccctctcccgctcagcttcaatctggtggaccttctcttggaataaatccagtttagcgttgagtccccgttgcacatcttcggtccatcgggttcgttcggcttcggcttgcgcttcctgttgtctccagcgttcggcgaactcggcggcagcgcgctcgtgctccaggcgtgctgcctcggcgcgggcgctctcgatggcagccgccacttcatgcgcctgcatcgtcgacattggagacgtgctgggcacgctgggaggctccgggactggggcgtccggcctcgatccggtctgcacactgccttgaggggtagcggtgcgtccggcgagctcttggatcggctggaacgcgctgggaagaccttcattcagtcgggccgcgttggcagcggatgcctcctggttcagctccatcctggccaaggcttcctgcgtctggcgcatcgtgttgagcgcaacttgggacgccctggacatcacggacatcgctgagcggcttgatcgaccggatcgagtcgacctgctcgaccgactcggtgcgcgcttcgatctcgaagatcttcggcggcgcatctggtcctcgtcactggagtcagattcacttggtgacgggcatcgcctctcgcgcctggacgtcgtttgccgaccggatgaagctctcgaccttcggtcactccggacggtggtacgatcggactccgacataacgacatcgtcctgatccaccgccgtcgatgaccgagggagtgctgtccgggtgatctcgacgactcctccgcctgcaccagactggatcgctcctgcctgcgcggtcatcaccatgggtccgtacccaatcgcggacatgtgcctcgcggcattgtgtccggaccacagcgacgacgaaggcgagctgcctctggacgatcgagctgctgacgccgcactgaacgttgactcgttggatccagccgtcgtcccgaacaggctcgaatcaagatccgagggtgaacgagatggcggacccagttgcgccaacactccagtaccggatgcgcgctcagactcgctggacgcgtggaacgacgggagcgaagacagcgacggcgtggacagcggcggcgcggacgggatcgacgacacggactgggtggacggcgcgcgaggcggtccgtgctgcgggcgcttggaatccggttcgccggtggacgacccttgcgggcttcgtgtcctccggaggccggccactcgtaggcgcaggacgaactcgcgacccaatagtccagcttcgtaatccgacatcaatagatctccgtcgttgtcttctgcatggtagtccaggatcggtgctcgcacagcttgtgacagtgtcgatccagtgtttccagcgttcgactcggtctggtcttgggcgtctgaagcatccagcacgatcttgaagggcacaccggatgccaactcgcgccactcgatcagctcgaacgcgaggaagtgctggacgtcctcggccacagagcgcaccagactcggtgcgattctggacgactgcgactggaaccacatcgggatcaggttgtgaaacctgaaaccggcagcgaagaggagagactggatgagcccaacgcactcgcgtggcgacaggatgctcggcggaatcacgatgccggagacatcctgtaccaggcacagctccagtcgtaccggacgaagctccgcgatccacgcagcgtcttgactcgccatggccatccggtccgataggtacttcgacgttgccagcgcggcagtccaccattcagtgaaatcgggtgccggctcgggccaggcgtactccaccttgagcgggacggcagcgcgttcacgatactgctcccagcgacgcacttgttcggccacgtacgccttcgcctgagcctcgctcacttgagctttggtctcgtcgggtcctcgcgaatccgagggcgccagactggattgggattccatcttgatcgcgggagcttgggcggtcgcggccggactggattgcgcgggcgcagaccgggtatcggcttcgtcattcagtacgccgtcttcttggacagtcgacagcgggccttcatgcttgatcgtcggggcttcgtccagaatctcgacttcgtcatccggctggggagagtccgaaactcgatcctcagccgggggctcaacctcatcggcgcctcccacagacgcctgggcgggttcatcatcctgtgcgaaacaccctgatccagtcccgtcaccgggtctgggacacattcggtgccggccggcacagactcggtcgagtccgcctccggagcctcatcctgatttgcttggtgcgcatccagaacggaggactccggggtcgcttgatcttgatcggccgccgacgccttcttcttctcttccagggccgccttgcgcttctccgcgccagccttccgagcctcccggacaacgtcgtccagggccttgtgctcctccggcggcagcccttgtcctcgacgcgactgacgcgacgcctcaccgcgtccgcctccacgtccaccttcacgtgcttccttccttccagccataaccaaactgttagtccaggcagtcagtagaaacaccccttaagaccaaataatatacaaacaaacaactcgcggtgaaatcctaggcaaccaaatccgggcacgcgcaccagctgaggcgaggcgggtgaacgccttgatcgtccaggtgtatagcgcactatgccggaccgaatcggttcggagtaccagagatatccgctgcaatccggtagtcctcggagcacaggatgtgaaccgggggccgggaggatcgcttggacttggcgtgtgtccttgtgtcaacccctataggtatcgtttacctttggcggaccggacttcaccgagtgagtcgttgtaaatacagaatcgagtctgctgggtgtgttcctgaaacaaactacaccgaatgaacagaaagtcagaccgaatcgaagggaccacagtcagatccacaattcaatataaccaacacacagaaatacaatgccgagctaaacgtcacaaaatatacagccaccacttattctttaagacccttgggtggggggtctatacgccagtcaacttacgagccgtcacccaaggcactggtcaaccctggatgcacactcactcacgcgcaccaccctcacagagtgagggaacaatacaaaatataagtcaatcctatcatacagtagtcgatcaattcagtctcgggggtgactacctctaccgcctaagacacacaggatggaatatgaaatggatgcccggatagagcacgcaaattggaaagaaagctctcacagatcactccagggcgcgacaccccagtccctgccgactttgccttggtacctttgagtccccactacaccagtgctcgcaacaccagtgaggccttgaaacgtcctccgttttaagatcgcacgaaggcggatcccacgtataagctcttgaagacgtcaatgtcggggggaattcccagcccgaagaaagacgttcgcgtgttctcggcaaattggtttctgtttgatcttacgtttggctagctatctgtttcacttcactgacttctaataaaggtttcactatgcttgacttgtcttggatatgcttcgaccttgtgcacgggacttcgatcttcttgcactgagcttgggtatgcttgacttggcttggttatcgggcaccttgtcgacgtcaacgttccttcggcaacactcatcatctggcgtcagaggtacgtgggtacggcgtctcatcaaatccgcactggacctctgcgtctaatcacgtgagccatcctgtgtcgcttgacgttcttggtcgatccggtccttgattgctgctacacacacagcagtactggacttgttgttggtgcggtcacgatccagtatgggcaccaggggtcagaccgaattgatcatccggtccggcctcattcagtacggcaccttggcctccggtgcgtcgctaccgggtgcaccacgatccagtccggcaaacagtgtactttgtccagcgaggtcttgggagcatgggagcatggtgggcatggtgaacttgggggttggtccgatgtcttgacggagccaatgcaggcagcagccaggatacgttcactggctgcacttgcgcgccttaggcttatcctgcggtcagggaagtcggcggacggacaggatgtgttactccacaccgaatatgagcgctcatccggtgggcacatctccgatcctgtgagcccatgcttactgcaagcaccgggccccgccaaattcaccatgcgcatccactatccacatgtcacactccacgtcactggattcctgttcactgcgaccagtcacagtcaggcgaagggtcgtcccatcccagcggtcagacatgggtgcggataaaaatcctttcccacatcgtgtcaatatcatgctgtgacgaggctattgcacccatctatctgcacctgcaaccgtctggtgcccgtgtgaacccgttcattaactcgtatacatccgtatagccggctagttgaggaaagaacattcgagagccttcgcctacgatactacaagggcgaactgtaccgtggtatgttatgcacatgtacaccacaaacggcgctgagttcgccatggccacggactcagtcaagtccgagaagctccagttcataacccccgtgggcaagcccgatcctcgagcctgggagagctcgatcttcgagggctgcgccatcgcacagtacgtgttttgcctccgcaccgacactggtagtctccggaagcatgcaagcatgcatcaccgctgttgcctccgccaagaacatggtgtcgtggaccgccgccgccaagtacattgaatctgccgccgctgctggcaaggacatcaccgccgccgccaaggacgagtcactgagaggtgcttcaatgtccaagttgctgagtggtgcatgcatgtgtcatcgctgctactactgacaaggacatgtgggcgcaagccgctgctgccaaggccatgctgccgccgccaccaacgacgacaccaacgacgaagagctgagcggtaccaccaagtacaacgtcgctgccgtcgctgccaaggacacggtgccgcgagtcgccgtcgccaaggacgagatgttcggtggttccaaggacaagctgctcggaggttcagatactcataggttccgccaccaaggtcatggtgcagcgagtggccaccatggacgagatgcttagaggtaccacggccaaggcaaatacagtagaactatcgctgaagagaatagtggacgggtaataatacttcatcaagattgaatgcacaactagttcttttagaagtcgctgtagcgcgtaacacgttagaaatgctttgattacatgcacatgcagagatacctgtatcggaggcacttcaagagatccttatccagtgctcccgtacgctcctccctgacaaatagctcgaacgacacgagcacgtaaatgccgcagttatagctgtcgaactggataccgagatcgccgtctaccctgcggattctgtagcgcttgacccgtgcgtcaggaattatcgctactagcatctcagctactactcgcacctttgtcaaatacgatgagcacatggagtcgtacaatagcacgtcgtttttggttaggtcgatcatgatgcagcaccagtggattccgcttacgttgattggtatcagcactttctcgtccgacatgccaaagaaaatctcccgaatcgtatccatattcacgttcacctcaccgcgccggccaatttgaatgtaggtgggatccacaataacgacagcatggttctggcggaacattttcttcatcagcgaccgcatcgttgagtcgcctagacaaccccgtgctacgagatctaacgcttccgtctaccatgcaaaacatatataattagtcgggtgaactagactatgaaataaggtaacttacgcttgacgagagaatcggaagggacttgagtttgtcgatgagatcggggtcttgagaagtggcaaaagaaccggttcccagagtaacgtcgacgctgtcgatccacttcaacgctctttcaacttcggcgataatttttcgagcgcgatgccatttccgcaagattgcaagagtagaggtggcgtacacgccgacgccaacaatttcaacagcgacgtcccgctctgctaaaccggatttttttcgcttgaacgacagtcactttggtggcgcacttgcgaagaaggtcggccttaaaaatacgaacgaggtcggcgggtgctttcattggcttagtgagcatggtgatctcgtgggcaactggagctttcacgttttggagagcgaaaagttggaattgtccgatgatatcagcggccgaagcgtacgttggctcctctcgtaagcattcgtccacatcagcttcttctcgagcatgtccgagtcgtcctttgccatcgcaatagcattgttctgctgagcttacttaacttttgatttctgctttggccttcctcgtggtctctcagggccttcgacattaaattcatcagaggctttgacttcaattaggccttcttgtgaattaagacgcttcgttctaggcttcccagcggcttttatcagcaggtttgttgtgcgtcttggcttcacagcagctttagtcagtaacgtttgagtgcgtttcgtcgtaacaacggtgctgacccggagattcctcgcttctgttggcgttttgttcgatcgtttaccttgaatttccattgcagtgcctaactccacctcgtagtaggtccgggtacccgtctcgatgcccgactcgactccagcgcccgtctcgatgcccgactcgactccagcacccgtcccgatgcccgactcgacttcggtgaccggtggagaccttgacttgcctccagcacccgtctcgatgcccgacttcgcttcaatgcatgcgacgttgcccgagtcaacttcagctaccgatggagtgcccgattcgtcttcgggacccgtctcgatgcccgactcgcgttgattgcccatcgcgatgcatgatgcgacttcggtgctcttctcccggtctgacgccgttggggtgctcggatctctctgcatatttgttgcggccttcgcgatgttgctggttattaattctgaagtacctgttctgcctacagttgctagctgctcgaagttgtgcgtcttgaacaaatccgctacttgacgaaacgctaacattgctgtacggtactgaggcgtgcccaggccagccagcgtatcgcagatataagtctacaagaaaaaagtttcctctctcgcgtttttaaagtgtcgaccgttcagaatccggagtatgatcgcgagatgtctgtcgtggccaacattgtgagcgagcacgcctgcaagcagatcttcactcagtaccagtacgcacgtcgccgtgatactacctaccggtattacgaagcatttcctaacatctacttcatcaaaaacgagtccaaggaagaagatgctctcgacgagccgcgggctgagtactctgtgaacaagcgcaagtgggagtgttcctgtatgtttatgatgacacgcctactgccttgccgccatgtatttttcatccgccagggtattaagaaagagacgatcatccctacccagcttttgtaccggcgatggttggtgtcttcgatacgcgccactccccccccccccccccgcctgagctcgtacgcccatcgtttgcagttgacaacgtgctttgtgagcccgaagtgccatgagactccaacagaaagtatcgagaggcaaaagcggttgccaacgtggtagtacatgatggatgaaatgcactcgtccagctccatgaaagaatccacccactcttttcgttgtttccacgacgactcaaggcgattgtttgtgttgttgcccaacgtcacacagttctggtgtttgtaggcgcaccacagctctcggcagttatcccaattccgtttgaaataccattcaaacggatgagtacaagaatcatcgaccgcatttgcacttcgctgcatgtgttcgtcggaaaccacgtcttgatcatcaagtacgtcctccaatgcagcatcacggcttcggttctgagccaaaccggtactctcggactggccatcagtactcgtgctagtagttgccggaagcgctgccgcaactgcgcaccggccaattttcaagaggtaccgcatgtatctccgatatttctcgtactctagttccgtcctagcgtacaccagaagactcattgtacagcgcagttgctctctttgccacgagttgagcccgtagtcagcagaaccaatttcctcacaagatacttgagcacgtgaaactggcacaacaggagagtagcgtcgggaaatgcagtcttcagaacggacatttccgtaaaatctttgtcgatcagaatacactggattttaacccaacctcggttattcttcttgaactcttcaatggcagtcagaagcgccgggcgccgctcattctggataagagcgtgctggacaaattgtccatggccgaaagcatcgtgggccatgaacgaaaaaaccttatacttttcggcattggtaccgtgggtggcatcgatcaaaatcacttccggaaactggtcaaatactgctcgcatttgtttggtttgaagtgtgatacaagttgcaacatcctgaaaaaatataaacgcagacgttgttaaaattaagcatattctccgtttcattagggcatgcgcgtaccttttcaccagacctatcgataaagatgcggccaacatttccgtcctcttctccaaactcagccatccaagccttcagccgttgagcacttgtcgtccaacgtaaagcgttctctcgcttcttcagcctgtgcatgaggttgtgcacgtcgcggttggtgggcttgcagtttgcgaatgccagatttctttgcgccagcctttcgtagcacatctaccgtttggagaacggcgggtgcgatggctgtccggactgacgcatactgatcatacagctccttcgtcagtttgtggttgtgcactaaagactttgtagtaacttgaatagcgagcgtttccccatccacaactctaacacacgcgttgatctaaccaaaccaatacaacacgaaatcccgttaaaacagaactaggacatccaaagctataatagcatcaataactctaatatataacacactgatgccatcagcgcccgaccagttccaccagtgcccaaccaggtgccacagtgcccgaccagccgctgcggtgcccgattggccgctgtagtacccgtttgacgccgaaggcgcccaacaagcagtcgcagtgcccaaccagccgctgcggtgcccgacggatgcgtgtagagcccgaccggcgctagtggtgcccgctagaccgaatggcagcatagtggatagcatacacttaaaaaaaatacaaccattacctgtgctgtgcatcccgtctgccttgattcctgccgtagtcgctttccttgtccgcgagacttgaactcaccactgtgtgtacagacaagagtcttcgcgtagaagccaaaactgtcaggtatgggtgtaccagacccggttttgaacttttttatctttgcgttgcgctcggcggccgatgtgttggttctgatgcggaaaatctactggcacatatcggagttagatcatcgctttcgtgtattgtagatacaatgcaagaacttgcttgataggaccgagactgatactcattgatgtacaactcgaacgctttccaggaactgaactgggtctcctccagtggcctgtgtcgccgtgtgagctcatgactcgggtctaacgtaacgacgcggtccgagagagagcatcctgtcgcgtcgtcagcatcaaggtcagcttcggcgtcatttggcgccccgggtggccgtcgctttttccccagaacacaagcagccatgcttgtacggcgagggggggtcaaatgcttgagcccgctgcagatttatgaatgggtggttggagatagaaagtataccgtatacgaagctcggatggatctcaaaccgtggttagggtacttgagcggacgattgaaaagatgacgccagtagacgggtgcaccaaccactctctattttattttctaatatcgctaatttttttacggcacctcgctaaaaaacttaatgttgcctaaaacgggcttcagataaaaggctgttttctcttttctttctgctgctaatttttttaaatcatagcgtgaaacggagcaaatgcgcagctttcggctgagttattgaaacgtttttttttgtaaaaagttatgtccagaaaaccgaagtgttgtttcttatgtgggccagagaagtacgaaataggtttcaaggttcattcatacactgctactagcggaacaaatcgtctttttggcaacggcttcatttactttcgcaaggacaagataaacaaggcagtttggcacgccatgtcgagcgtcaggttagtcgcgggccgcttaaatcattctccttgcgcgctgagagctgggtgttgcgccacagctgcttcatcggcatcacggtcgcgagcggaagatgcgtgtgggaaggcgtggtgtggtcggtcggaggattcgcaagtgcctagcatgcgtaatactgcggcaacactgcagaacttactcttcttggaatggaagggcgaagagaaaacaggtgtggaggcgttcaagctcctcgaattggatgaggcaggaggagacgttttccgaagtgccgcattcacgaactgggtcgtagtatcttggtgagatggcacacaaagaagacgacctgaccctgaaaacatagctgtactgaagcagcgttttcacgaagggggtctggcagagatgctgatttcggtgaagcaggatgcatctttcgctggcaaacttgtgatctttgactaacagaaggtgcagtttacgaagaccccgccaggattttgcccgatgctgaccggacgaccaaaggttgttgagaattaccgagggagttcgatactcttagccgcgtgcagaagggttttgtgagacgaaatcagtcctagcaatcaattgggtaagcttacaatacagcgaattgttttcggcgataagcttttctcgagtacgcagtttgacgcttgacatttgtatctgtcggtgtctatgataaccgccacaaccgtaggatgatgtacgccgtggggttctcgcacttgccaagcgcatggaacattgcgcagatcaaatcaaatctggagttacatcctacggctcccataagctgtaaacgcaattgtatatgccattctcgctacatccacatccccgtaaacgcttaggtaacctgccgtactaacagtttgctgtccgtcccgtaaacaacggtgagagcaggttatgcaaaacaacctactcaaactatttgctgttcgaaaaacttcacaatggagatgaagattatccactcctcggttcatccggaccgccaataatcaacgatgactaccgagcacatcgtttctttgacttcgaggcgccttagacttgagcctgcccaacaaatgcacaacaacgtgaacgcaccactcacctcgttcaccattttccaacttacactcaaccgaccacttcaccccgacaaccaccaaccggccatgaagttcttcaccgtcaccgctactgtcgctgcctgcgcaatgatcaacatcaacttcgtcgccgctgaaacttcgaaaggagcctcatgggcgtacaagcacaacgacgccgatatggccagccccgagcaatgggccgagcactaccccacttgcggcggctcgcgccaatctcccgtcgacatcaaagtgaccaccggcggaggcttgacggctcgctcgctatcgttcagtgggtcgtgcggcgacttcaacctcacggagtcggacgagtcgttcaagggggctgtggtcggcggttcttgctccgtctcagccaacgatgcaacctacgatttgacccagttccacttgcactcgccgtccgagcacacaatcgacggcaaggccctggacggagaggcccacttcgtacacagcaacagtggcggctcggcgttgttggtcgtggggctcttcttgcaagcgggggactttgagactgatccgtggctggagggccgtgctagacgctgtcacgcccgacaagtcgcagttgttgaacctgtaagttgaagtgtgatgtgcccgattggtcaccagttgacaaactcaccttgcattttgctgttcgtgtacgtacctgcagcgcctcgtacgctgaccttatcaacaccaaggcggacgctgaccgcgtatacaactaccccggtagcctcacgacaccggcctgtgacgagatcgccgactggtgggtggtgccgacgcccgtcaagctctccaagaccgacttcgagcgcctgcagaagaacctcaaggagctgcacgtagccgacgacggcaaaaacgctcgccccgtgcagccgctcaacggacgctccatcgccagtctcaagtaacttacctccttgcctgagcactccagtgggcacacactgacaagatgaaaaaacgcactttccttgcgtactgcgtacttggagcgtgtttatcagcgttcgtccaatctgcatcgtagcatctatccattcattccgtttgccaacattcacaacacgatcgtagtaattgtctgacgtttattttcttggtttcgttacgagcccacgcaaggccttgcatgcgctctctgcatccgtgtggtaaatacgtccttcccgtagctgccacgcagaccaaaggcttagtagacacgcgcgaagggcgggacgtgcttgcactcgttctcgtccagagtctggtcctgcaccgcgcggtaggcgatgtgcgtcttgccctcgtcgctgtggtaagcgagcgtgtgcttcatccagttgacgtcgtcacgctccgtgaagtcctcgcgggcgtgagcgccacgggactccttacgggcctcagcaccgtgcatggtgcaggatgcgcaggccagcaggttgcgcagctccagcgtctccgtcaggtccgtgttccagatgagcgagcggtccgtcaccttgatgtcgttgaacttgggcacaacctcatcgatcttctccttaccagcctcgagcgactcctgcgtgcggtacacggcggcgtccacctgcatcgtcttctgcatctccagacgcagctcggccgtggagatgctgccgtcggcgtaacgcagcttgtccacgtcctcgatggccttgagaccaccgtccttgggcatcggacgcttcttatcaccaggcttggtcagctcagcaatacgcagagcgcaagcacggccgaacaccaccaggtccagcagcgagttggcacccaggcggttggcgccgtgcaccgaagcgcaggcagcctcaccagcggcgaacagaccgggcacgatcttgtccgagtacagcttgccgggctccggtaggccgtcaagatccggcacaaccacctcacccatgtggttggtggcgataccacccatgttgtagtgcaccgtcggcagcaccgggatgggctccttggtcacgtccacgccggcgaaaatcgcagcggtctccgagataccgggcagacgctcgtgcagcagctcaggcggcaggtggtccaggtgcaggaagatgtggtccttgttcttgccgacaccgcggccctcgcggatctccatggtcatagcacgtgacacgacatcgcgcgaggccaggtccttggcagtgggggcgtaacgctccatgaagcgctcgccctccgagttacgcaggataccgccctcaccacgcgagccctccgtgatcaggcaaccagcgccgtagatacccgtggggtggaactgcacgaactcagggtcctgaagggggataccggcacgcagagccataccggtaccgtcgcccgtgcacgtgtgggccgacgtgcacgagaagtaggcgcggccgtagccgcccgtggccagcaccgtgttgttggtgtggaagcggtggaacgtgccgtcctccatgttgaaggccatgacacccacgcactcaccggcgtcgttcatgatgaggtcgagcgcgaagtactcgatgaagtacgacgtgtcgaaggccagcgagcggccgtacagcgtgtgcagcatggcgtggcccgtgcggtccgcagcgcaggcggtacgacgagcctggccacccttgccgaactccaggctctggccgccgaaggggcgctggtagatcttgccctcctccgtgcgggagaacggcaggccgaagtcctcgagctcgcgcacagcctccggcgcctgcgttcaaaagatcacaagatatcagcacatagaaaaactcaattgcacggagccgagctgacagaaacacgcccactatgggacgaacacggggagacacgtacctctctgcacatgtagtggatggcgtcctggtcgccgagccagtcgctgcccttgaccgtgtcgtacatgtgccaccgccagtcgtcctccgacatgttgcccagcgcggcgttgatgccgccctgcgcggccaccgtgtgcgagcgcgtggggaacagcttagagatgcaggccgtcttgaggccggcctcggcgcagcccatggccgcgcgcaggccggcgccgccagcgcccaccaccacggcgtcgtactcgtggtccacgaccgtgtacttggacgtgagcgccgacgtctcgacgccggccagcggctgcgagctgcgcacggcgaagccgcgcgaggcggccgggcgggccagcgacttggccagcgcctgcttcatctgcgagcagcgcaacattctagcttggacttcgtggggaagagaccaccggaaccgcggagaccccgaccgcaaaatctgaactggagagagcggctcagccgctgattgagcgccgactcgaagtttgtatggcccctactgaaaacaagacaactggtttaaccccaaacgaggttttactgtctcgcctcgcacagtcgatatcaaagtcatatccgttgccgcgggttatgtgatttggagggtgatatatatgggctttagtaaagatatactgagcagctgtttaccaagtctcggaggccgaaagcttcaagttgttaagcggggacgaatggataaagcaggtgccccacgttgtccacgtcacagagcaacgggctgcagcgcaacatgggccgaaggaggtatcgccgatatcgtatcggcacgagcacctccgccgctggatacgagggcttccgacaatgcacaaacactttattctattggtacttgcggcgccagtagtcctgctggtaccacagagtggagtggggctcgtcatggtctccgctgtcgtcgccgtccacgctgacgactgcgccgggcccagcagaggaggcatacacaggcagccaccgcggatctgcagcttctccgatagactcgagcgtcgtcaagagctcctcttgctgtcgctggagcgcagatggggtattggccccattggccgccagcttctggtccatcagcgcgtccatcgctagtcgctggatctcggcgtcttcgtcctcgctgcgcctggcctcggcctctcgtcgctggtcgtccttgccgaacttgtggcctgctgctcgtgaggcggaggctgtgggcgaactcgggatctcgaagcggtcgctgggcgagaaggaggtggcggacgaccgtctccgctcgttcgagtcgaagagctgctggaactgcgcgtgcaagatgccgagctgcgtgttgagctggttcacggtggagaagtcgctgaagttcaagggcacgggggctcctgctggggcgggcgggggcaccggatttggagcgggctgcgagctgccccctggccaagaccacggcggagacccaacgcccgaaacttggctcggcatcggccgttgcgtcagatacacgcggatggtgtgcagctgctcgagcaagaccttgttgttgtcctcgaggcgacttacctcgcgccgcaggaactcgctctcggccaccgccgttttgagcttctgctccgcgcgctcgcaggcctcgtgtgcctggtgctctcgcgccaccagctcgttacgctcttgcaacgcgcgcatgctgagctcgtcacgcagcttcttggccactgcccggcatttccgcgcccactcatcgctagatcgagtcacacaggcctgtgctagctgcgggagctgccactcgacggcttgctgcatgcgctgaagctcctccgtccgtcggatttcgtcgcgcttgcgagcgtcgcgttcgtcgctcagctcgcgctcgagcttctgcatcttcaactccaccttctgcttggacgcgcgaagctcctggatctcggcgctggtttcgatctcgacgtgacgcgcctgcagcgcggtgagctgctcgcgtagctccatcagttgagcgtcacgcttctccacgcgcgcggcttccttcgctcgccaggcctccgctttggcgaatctctcttccaaacgagtggcctcgtattccttttgagccacctggctttcgagctcgcgcacgcggaagttgagcttgtcggtgtctattcgcttgtcatgctgcgcagataacagctcatcttgcagtgttgcgagctgcttctcggctgcgtttttcgcagtgtttaaagcgtcggtctgtgacttccgctgctgctctcggcgtaccagcacgtccacctcgatctccaactggttagcgcggtcagtttggctcgatagctcttgcttggcagagcgcaactccttctccagtgtcgtcgtgcgctcgatgagacggtcgacttcgcgttgaagctgctcgcgctgtttctcgagtggttttacctgctgcgcctgcacgcttgccaattcgcctcgaagctcaacaacttccgactggagtctggctttagcggtggtctgctcatccagttgggcgttgagttgcgactgtagcttttgaatgcggctttgggcctgagcttcggcatccgccgttatacgttctcgctcgaggacgagctgctgctggtgtcgttgctgctcgaagctgctgttcactgtccggagttcgtcctgggccttgcgaagatcatcctggcacctgcgaagttcgtcctgcgttctgagcaccgtggcgtgcaacgtggagttctctgacttcttcgcttcgagatcatgagtcaacgcgttgtgtttcctagtcgtttccgccttttcctgctcggcacgatcgagctgggcttgtaagctgcgtatcttctcctccgcctcccggttcagcttctcctgtttgacaagcgactcctgaacgtctcggagctgatcgcattttgtggcttgctcatccgctgtgtttttcaaggtgcgaagctcttgctgcagcttctcgagctgctcactctttgaggcttgctcgcctgctgtgcttttcaatgtacggagctcctgctggagtttctcgagctgctcgcactttgtggcctgctcatcggccgtggtcttcaaggtgcgattttgttgttcaagcttctcaagttgatcacgcagacctgcgacttcagtggcatgctggcggcggtcagtctcagccgatgcctcctgctgcgcaagcttttgcttgagctcttcttgtgctttttcgtgagcttccgacgttgtctttgcttgctgttcgagctccgcaagacgtttctgaagacgctcgagttccgcctgcttgctctcgagggcttctcggttctgctgggcttcttttcgctgagtctccatctgctcgctttgggtttggccctgttgcttgacaagacgcgcgttttcagcctcaagcttggccattttatccgcctgatgcttctcgcgcgcggacgcagcgctttcctgctccgccaatttgtccaggtgctgtttgtcacgtgcggaggcagcactctcttgctctgagagtttcgtcttgagctcgttgactttcatcttcaggtaattgctctctttcgcttcctgctgagccgtttggagctgccgggtggtgtcggagtgagcattgcgctcgcgttcaaggtcgctggttgcgtcggccagcttcttttctagctgttgcatctttgcggttgttgtgggcgatggagcagatgccactgacgctggttgagccgccgtatcctggaagaaggggcccttgatggttgatgctatcgagctgggccttctggagttcacctcggtgttctgcaccacagtttggctggaaggtatcgggctgagaggggtcacgacgtctgtggtgctggttgaggacagcgagagcgttggtgtgactgtggtggaggcgccagagcgtctcgagccgaacgatcccaatcgtgatgttgctggcgtgacactcgtatccgcagtatcttgcttctgcagtgaaaactgggtcgacaatggcgttggctttgcgaccggagagtcgtcgtcatcaagaagccaggatcggtctcggccaaagcctaaacctgaggctgctggggtagtttgtggcctctctgtggttgttggggccgactcggaacaggtgttattgcccagcttcctggccggcatggatagggatggcgtggcgaagagatcactgattctagacttgtttggcactggagctggcgatgcaaccggtgtcggcgtttcctcgtcactaacgtcgtcgaagctgtacacgtcaacgctgttgcttggtgctgttgctgcacttgtcgctgatgtcgcctcgctggccggagcagcagagacttcggttgctgcctccgttggtggcgcagcatgctcgtcctttttggcctggataagatctcggtaatgcgcgtcaagcgggtgctcccaaatgctttcctctgtgctcgagttgaagtagtacagcgtgccgtcctccgtctcgccctgttcccagtcaggtggaagctctgcgagcagagcctcctggacaagcggcatcaagtagctctcggtgtcagggtctacaccaagactgcgcgcatggtctcgcagcgcctcctggaattcaggactgccggtgtccatgacaaaaaattgtactacacacttgttctcagcaacaaggcaagcaaactccacgtgaggtggtttggagaagaaccacgaatacgtgcatgacatgggacgaacatcacttgaagctaaaaatggccgcaattgaaacctcgatccaactgtgccaccgttcgctatctaacatgctggcccaacgaaacaatattagtcaccagttcgcaggccagttgcagtaactcaacaactgtgcaatggaaaataaaatcattataaatcattcgtactcctctttcagctcgatacagggccaacgcgaattcacgcactgattatctcatgccttactccttggccacctcgatgatgatcttgcccttggcgcggtgcgacatacagatcttcatggcctccaccaggttctccagcgggtgcaccgagtcgatcaccgtcttgacgtggccggcctcgatgagcttcttgagctccagcaggtactcggtgcacggcgcgttgaagatctggtgctgcgtggcgccgatgggcgactcgatgggcttgtcgatcacgccgatggtcacgaagatgccggtctgctccttgagcaccttctgcgcggcgtcgttccacgactgggactcgacgccgcagtcgtagaccaagtcgaccgagtgctcggccagcacgtcgctccacttgtcgctcgtgtagtcgatgacctggtcggcgcccagcgacttgaccagctccacgttgcggtggctgcacgtggcgatcacctcggcgcccagcgccttggcgatctggatggcgaacagacccgtgccgctgctgccgcccaggacgagcacgcgctgacccttctgcagcttgccgtacgtgacgagcgcctgccagctcgtctggccggccagcggcacgccggccgcctcgttgaacgtcatgttactgggcttgtgcgccacgcgcttcgtgtccacgttcagatactcggcgaaggtgcccgtggcgtcgaaccacggcatggcgtacacctcgtctccgaccgcgtagtccttgacgtcgctgccgacctcgaccaccttgccggccaggtcgtggcccacgcggtacgggttctcgggcgacgccatggtggacaggatcatggacgcgtagagaccgatcttgtagtcgatggggttgagcgacgcgctgaagaccttgatcttgacctcgttgggctgcacgggcttctgctcggcgcttgggttgaacttgatctgctcgaggaagtcgccgaagtgctggtactcgtaggccttgaaggtagctgggacggtggcggccatggtgcttggttggttgggttgggttggtggtgttgctgtgctgtgctggacttgtcgtcgacggagctttttggagaagggtctcgagttgggagcaacgagcggatgcgttcctattagccgctgacgtacttggggccagggatcccgaaaaataaatacgcccggaaatatatttgtattttcggaatcaatattttattgtaggtatacctccttggtttatccggtatttattccagcttagatcaaaacttctagattttatttctgcgggtgaatatatccttcatgattgagaagtttttccccctaattttcattgtgttaacgccatcaaattttccctttatgctaaaatgatgttgttcagcaaccttaacacggatgtggcgaccgtgggcagtgaatcactgctcactgccagtgattgtaagaacccatgaaggtaacacgattgcagcaatttactgaataatttactgcgtcagcacggggtcttcagattatttatttcttctctccttggtatacaaacaaatatgtatttcgttaacttgagaaaatagatatatatcgtattttcggcatgcctgcttggggctcggcatgctaatgattcgggttttgtaatcggccgtcaacttcccgggcgattgctcgcacatccaacctggatttctagatgggctttgacttggaaaatgtattgggtttataggttcaaccgatgcgttgggccagattgcgtgaatcaaatgcttacacaaccgatccgtagcgttatccgcagtgtgcttgacgacactcgcctcattccgcaaaaagatcccaagcgcgcaagtcccccttcaacccaagcaccaagcaccatggccgcctaccccgccacgttcaaggcctacgagtactacaagtacggcgacgccatggaggagatcaagttcaacgccaacgtgacccagaagccgatcaaggccgacgagctgcgcgtcaagatcttcagcgccgccgtgaaccccgtggactacaagctggtcacgtacggcccgcacatcctgccgcacgcgcccacggctgagaaccccttccgtgtgggcttcgacatggccggcaaggtcgtggaggtgggcagccacgtcaaggactacaaggtgggcgacgagatcttcgccatgcccggcttcgtcagcttcggtaccttcggcgagtacatcaacattgagaccaagtacgtggcccccaagcccagcagcatgtcgtggaacgaggcggccggcgtgccgctggccggccagacgagctggcaggcgctcgtcacctacggcaagctccagaagggccagcgcgtgctcatcctgggcggaagcagcggcaccggcgtgttcggcattcagatcgccaaggcgctgggtgctgaggtcatcacgacgtgcagccaccgcaacgtggagctggtcaagtcgctgggcgccgaccagattattgactacaccaaggagaagtggagcgacgtgctggccgagcactcgatcgacttgatctacgactgcggcatggagccggcctcgtggaatgacgccgcgcagaaggtgctcaaggagaagaccggcatcttcgtgacaattctgacggtcgacaagcccatcgagtcgcccattggagctacctttcaccagatcttcaacgcgccgtgcaccgagtacctgctggaggtcaagaagctgattgacgctggcaaggtcaagacgatcatcgactcggtgcacccgctcgagaacgtgatggaggctttcaagattcagatgtccagccgcgcccggggcaagatcatcatcgagatcgccaaggagtaagcagtcaccaagtgccaattggatgtaatactgtagaaacataaaaatcaacggagtgttggcctatacacaactgttctgattgaaaaccgtgtcacctcggtagaacatgcaaaactgtttggtttcggggaccccggcaggttatcctatctattgatgcatctgcacatctcgtgcctgcagcacgaggcgaagcggaatggcgaatccccatcctgcttcgccttccccattagaactcaaaccgagtaggtgatctattgcgaaattcgttgttgtatttgtgcccactcagtgatttggttcgttgcaaagtgaaaatggtggggaaagcaacaaagcaacggagatttgatatttccgaagtcactcagtattttacgaccatactcggttctaatcgagtgcatggcacacacaaagtcgcttaatctcttcgggtagactacttagactcacttatttaagatgctaaacactgtcgcgtcattatcatccctcctgcacctactccttcgatgtcgccccagccggctacttttcacgttgctgttatcccaccccaaaatggaaatgacccccccccccgccgccgcacacacacccccaccaccacaacgaaggcagatcccattgctgccaccgcgctgcttgcgtcagctcaatctggtgacgaatcaatatgcctttcagtgtacaaactcaagaacgtcggcaaagtcaaacaggaatacgtcacggttttctgcttacggaattatcactaacttagccgagcggcgcgggatatgattcattgcctgtgcaccgcccattagtgaaaactcctcgtttcgcagaagcctcctaccccatattcaccatgtcggcgatccccgcgacgttcaaggcctaccagtacgaaagcttcggacaagatccgctcaaggagatcaagctcaaccccaaggccgaacagaagccgcttcgtcctggcgaggtgcgcgtcaaggtcttcagcgccgccttgaacccgatcgactacaagatgatcgcatacggccccgctctcgtgtccacgcgcccgacgcccgagaacccgttccgtctgggcttcgatctggccggcaaggtcgtggagctcggcgacgacgtcaaggactacgtcgtcggcgacgaggtgtacgccatgccgtggcttgacgcgatcagcagcttcggagagtatatcaacgtggacaccaagttcctggcgcacaagccaaccaacatgtcgtggaacgaggctgcgggcgtggccaaacgagctggcaggccattcatacgtacggcaagctgcaaaagggccagcgcgtgctcatcgtcggcggcagcagtggcacgggctcgtttgccatccaaatcgcaaaggttgttggcgcggaggtgatcgctacgtgcagtgagcgcaacgtggagctggtgaagtcgctcgatgccgaccgtgtcatcgactacaccaaggagaagtggagcgaggtgctggaggcgcattctgttgacctcatctacgactgcgacttcgaggccggctcgtggaacgtcgaggctcagaaagtattgaaagagcagaccggcatcttcgtgaccatcggcgtgatcgacaagcccgtggactcgcccattggggctacgcagcaccagatcttcaacgcgccctgcgctgcgttcttgctggagctgaaggaattggccgaggcgggccagctcaagaccatcatcgactcggtgcatccgctggaaaacgtcataatctgtttatcccaccgggcgaagggcaagatcatcattgaggtggccaaggagtaaacgctagggtgtacactcgatggtatacactcacggctttggaagacgaacgatgattcgaatgcctgtagcgcacggtaagccctacgaatccttcctgtgtcaagcccaatgcattgcatcatgcatggctctgcatttatacgagtacagtgtagtaaatctcaacgcaaggtaatgtaacgaaaagccttgcattaatcatgcctttcatcagtttaatccttagtggtcctcgtgtagccggcatgagcacttcacgctttggcacacacacctcgctaatatctgctactgctgcctctcaacagcaatacactcagtgcttcccacccgtctactccttggccacctcgatgatgatcttgcccttggcgcggtgcgacatacagatcttcatggcctccaccaggttctccagcgggtgcaccgagtcgatcaccgtcttgacgtggccggcctcgatgagcttcttgagctccagcaggtactcggtgcacggcgcgttgaagatctggtgctgcgtggcgccgatgggcgactcgatgggcttgtcgatcacgccgatggtcacgaagatgccggtctgctccttgagcaccttctgcgcggcgtcgttccacgactgggactcgacgccgcagtcgtagaccaagtcgaccgagtgctcggccagcacgtcgctccacttgtcgctcgtgtagtcgatgacctggtcggcgcccagcgacttgaccagctccacgttgcggtggctgcacgtggcgatcacctcggcgcccagcgccttggcgatctggatggcgaacagacccgtgccgctgctgccgcccaggacgagcacgcgctgacccttctgcagcttgccgtacgtgacgagcgcctgccagctcgtctggccggccagcggcacgccggccgcctcgttgaacgtcatgttactgggcttgtgcgccacgcgcttcgtgtccacgttcagatactcggcgaaggtgcccgtggcgtcgaaccacggcatggcgtacacctcgtctccgaccgcgtagtccttgacgtcgctgccgacctcgaccaccttgccggccaggtcgtggcccacgcggtacgggttctcgggcgacgccatggtggacaggatcatggacgcgtagagaccgatcttgtagtcgatggggttgagcgacgcgctgaagaccttgatcttgacctcgttgggctgcacgggcttctgctcggcgcttgggttgaacttgatctgctcgaggaagtcgccgaagtgctggtactcgtaggccttgaaggtagctgggacggtggcggccatggtgcttggttggttgggttgggttggtggtgttgctgtgctgtgctggacttgtcgtcgacagagctttttgaaaagtgagagcgttggggccgcaggctggtgtcgttgctgcgactgacgtacgtccggcggcgtttttgatgcttgtcaatcacgagggcattgtaatcaattgacttgcgaaaacgtaagatggattctgcgacggtatcaaggcacaatttgattggctaaaagtttattgaagtgccatacataggtacagaggtcacgtgcagtcgtatcgaggccggcaggcaacatcgactaagcggtgactgcacagtcgacagccgagttctaggcggcgacttcacgagctaccagatttgtgtttgttgttgctaaatggctataaaacttacgctaacaactttggctttaggataccctctacgccagcaaggtttgctagcttgacactccgtcgcactactgggatcagctcgactgcactaacacgaatgtaaatgtgtgtactgtttgaatatagctactactagcttgccaatctcggacaaccggactggcttgtgtgtctctgacgcttgggcggctgactgtcttcttcgattcgctcttgatcggcttgtcggatgagtctcaaaacagttgtaagcttaagctgttcagcttttcgcttacgtttgcttggttttaaccgcagtgtaccgtatccaatattataaagcttaatagtgtgtttcttgtcacggatttcgggcataggtgcgtccagcttggcctcgatcccattcataatgtgtcgcatcataattgacccttctgacagcgtcgcttttttctgcgatgtatccaggtcgtccgatggtattcctttgtacggggggtagttgagctttggatttccgaaccaccatagcatccatgccccaaggggatcgagactcggacaactaaattctctaggtagcacatgaaatttcccgccccagacatgatactggtgcactggaactggcgctggcactacggtgttgatcgactgacgttggtgaagcccaacttcgtctaacaacgatagaatttcctcacgcaataactctctcgtaatattgcccgctgccacaccctttttctcaagtacatgctccattctctgctccagtttgccaggcagctcatcaattgacctttgctgctggtcaagcttcttgtatagctcaatataaggcggtatccccgttggtcgcatccagagagactctccagcaactacttggccttcaagcgtcctaaggacagtggggcttgtaaacaaatgtgtcgaaagtaatgcatgggtggctgctgcaagtattccgcgtgatgcacgagtgatgctaggcacaaccgcaaaatttctgccatattggcttcgcgagagagaaccggaaacatagtctccacgcacgatttcacatttttatcggagccatcctgaaaatggggcggtaaagtagcgaacttagagtcatttacgggaagtcctgccactactcgccccaggaattgatctcctgcggctttataacggaaatagcgatcttgaactccaccgaggctccatccgcagcgaagacacacactcacgatcgagggaccacctgtacttcctccacaagcgattgtagccactcctttgcgcaccgagtgcgtaccgtaatttttaccagcgtctccttgcttcaaaaggttagccagcaccttgctaaatcgtagcttctggttagagcctggaaatagtgcccccggttccaatcgagggtggcatgcaagctaaattgccaaggcagtcacccagcacgttgatgggctcagcgggttcgcgtacaggtggcgtggatcacggggccctgaaccctcttggttagtcttcgtcttcacaaatattactccaacgctatcgtctttcgccacgagatgctgacgttggagagtctggaccgacattgagcgacacatcaaattccactgcgaagtcaaaaaaagatgcgaaaaaccgccatcacccgccacgagagtcgaattgcacacatccttataaagggagtacgtgagtggctgctttcctgatgtctttggggtgctagtctggtcttgatcagcctccatccgcttcatcccggagaacagttgtttcatatcatcaccgtactcaggaggtagcgccacgcgcttcacgcgataaagatccttgcgagcacttcggtacccgctcagcgtagccgtcttcacagaagcactcttgaacaccagaaaacgctcaaaaacactcggtgtaaactcacttagattaatgtcatcatcagcgtcgaaaaacctggggatattcccatcctccttagcgagctcgctcctgatccacttcttaatcccgttgaggctgctcttgtactttcctcttgtttgcttggtgacgcatgcatcgcgtatcgcctcgacgtcagcatgactggtactccgcgctggagcagaagcgcgttgcgagcctccatcactcatgttgctgctgggtcgatgttctttgtgtgttgctgtcacattttagccaatgaaggacttgatgtaagcgtcggcggctcccgcttacgtttgctcagaagaactgtatggcaacattcgcataatgaaagccagtcaaatcccgtgaggaaacaaacatttcctgcaaaatgtcagctgtccacgccgacgacttcgcaggaacccctatatcctacttacgaaagcgaaggaatccgagtttacgtgccaacctagattttttctcagattgtacagtagattggaggcggtattataccaatgatgcagacgagtatgttttcatcatcgcacggcgaatggcttggccgagtgggttggttcgtcacgatggtgctatggtgtatctagagggctgagctgcgctctcttacctgcgcaagggtcttaaattaaacgttagtgatttatgtacgaatatatgagtgcaacaacaaaaatgtgctgctataatcggcgacagctctccggtggcaagtagcaaaatatcctgcagctggctgatttgcggccatgctgagtatgagctgcagcggttgctctcttgagcttaagctaagccggttctgggtatattctgaccttgccggtccgcgtcataattacgccacatcctgtagatcgccacgcacagtattcaagcggtaggcgggtacgtgttcggcttacgcctggtaccgaagcattccgaagccgtttccgtaccggctcagcccagttgaagtcgcaaggaagcaaccgctgtaggctacagcaggcaaccgctgcacctcaggccgcttggcacagatcaaactagagcgcacaatggtactgtacttgctatcagctccatcgccgtttatagcagcacatttttgttgttgcactcataaattcgtacataaatcactaacgtttaatttaagacccttgcgcaggtaagagagcgcagctcagccctctagatacaccatagcaccatcgtgagaagccattcgccgtgcgatgatgaaaacatactcgtctgcatcattggtataataccgcctccaatctacaatctgagaaaaaatctaggttggcacgtaaactcggattacaatgccctcgtgattgacaagcatcaaaaacgccgccggacgtacgtcagtcgcagcaacgacaccagcctgcggccccaacgctctcacttttcaaaaagctctgtcgacgacaagtccagcacagcacagcaacaccaccaacccaacccaaccaaccaagcaccatggccgccaccgtcccagctaccttcaaggcctacgagtaccagcacttcggcgacttcctcgagcagatcaagttcaacccaagcgccgagcagaagcccgtgcagcccaacgaggtcaagatcaaggtcttcagcgcgtcgctcaaccccatcgactacaagatcggtctctacgcgtccatgatcctgtccaccatggcgtcgcccgagaacccgtaccgcgtgggccacgacctggccggcaaggtggtcgaggtcggcagcgacgtcaaggactacgcggtcggagactaggtgtacgccatgccgtggttcgacgccacgggcaccttcgccgagtatctgaacgtggacacgaagcgcgtggcgcacaagcccagtaacatgacgttcaacgaggcggccggcgtgccgctggccggccagacgagctggcaggcgctcgtcacgtacggcaagctgcagaagggtcagcgcgtgctcgtcctgggcggcagcagccgcacgggtctgttcgccatccagatcgccaaggcgctgggcgccgaggtgatcgccacgtgcagccaccgcaacgtggagctggtcaagtcgctgggcgccgaccaggtcatcgactacacgagcgacaagtggagcgacgtgctggccgagcactcggtcgacttggtctacgactgcggcgtcgagtcccagtcgtggaacgacgccgcgcagaaggtgctcaaggagcagaccggcatcttcgtgaccatcggcgtgatcgacaagcccatcgagtcgcccatcggcgccacgcagcaccagatcttcaacgcgccgtgcaccgagtacctgctggagctcaagaagctcatcgaggccggccacgtcaagacggtgatcgactcggtgcacccgctggagaacctggtggaggccatgaagatctgtatgtcgcaccgcgccaagggcaagatcatcatcgaggtggccaaggagtagacgggtgggaagcactgagtgtattgctgttgagaggcagcagtagcagatattagcgaggtgtgtgtgccaaagcgtgaagtgctcatgccggctacacgaggaccactaaggattaaactgatgaaaggcatgattaatgcaaggcttttcgttacattaccttgcgttgagatttactacactgtactcgtataaatgcagagccatgcatgatgcaatgcattgggcttgacacaggaaggattcgtagggcttaccgtgcgctacaggcattcgaatcatcgttcgtcttccaaagccgtgagtgtataccatcgagtgtacaccctagcgtttactccttggccgatcttgcccttcgcccggtgggataaacagattatgacgttttccagcggatgcaccgagtcgatgatggtcttgagctggcccgcctcggccaattccttcagctccagcaagaacgcagcgcagggcgcgttgaagatctggtgctgcgtagccccaatgggcgagtccacgggcttgtcgatcacgccgatggtcacgaagatgccggtctgctctttcaatactttctgagcctcgacgttccacgagccggcctcgaagtcgcagtcgtagatgaggtcaacagaatgcgcctccagcacctcgctccacttctccttggtgtagtcgatgacacggtcggcatcgagcgacttcaccagctccacgttgcgctcactgcacgtagcgatcacctccgcgccaacaacctttgcgatttggatggcaaacgagcccgtgccactgctgccgccgacgatgagcacgcgctggcccttttgcagcttgccgtacgtatgaatggcctgccagctcgtttggccacgcccgcagcctcgttccacgacatgttggttggcttgtgcgccaggaacttggtgtccacgttgatatactctccgaagctgccgatcgcgtcaagccacggcatggcgtacacctcgtcgccgacgacgtagtccttgacgtcgccgccgagctccacgaccttgccggccagatcgaagcccagacggaacgggttctcgggcgtcgggcgcgtggacacgagagcggggccgtatgcgatcatcttgtagtcgatcgggttcaaggcggcgctgaagaccttgacgcgcacctcgccaggacgaagcggcttctgttcggccttggggttgagcttgatctccttgagcggatcttgtccgaagctttcgtactggtaggccttgaacgtcgcggggatcgccgacatggtgaatatggggtaggaggcttctgcgaaacgaggagttttcactaatgggcggtgcacaggcaatgaatcatatcccgcgccgctcggctaagttagtgataattccgtaagcagaaaaccgtgacgtattcctgtttgactttgccgacgttcttgagtttgtacactgaaaggcatattgattcgtcaccagattgagctgacgcaagcagcgcggtggcagcaatgggatctgccttcgttgtggtggtgggggggtgtgtgcggcggcggggggagggggtcatttccattttggggtgggataacagcaacgtgaaaagtagccggctggaacaaagtctcttacggacatctattaatcacacgtacgaaacatgagtctgtagcggtaagcaccttcctgcggtgcagagcgacttggcagcaatctacataacttgagctaacttagacaagtgtaacatacaccccacatcgattacagcgagcgcaggcgcttcttggccttgcaggcggtgcgcctctgcgtagcattggactgctgggtggtagtagatgcagtctctgcggtcggtgccgtggtcgtcgtgacaggcgaaacggtcgtcgatggcgatgcagttcccgacacgggtgccgttgtggatgggctggtagtgaccgtagtcgtggtggcggtgtaaggggtggctgtcgtggcggcgggggcctcggtctgcgtcgtgtcggccggggcaacggttccgacagtggtttcctgactccagctcgagctgccgccgctcggagcggttgtcgctgtcgaagttgtctggccagcgttgctcgagccactggcaggagctgtcgtcgcaggcgactgcgtgtaagtactggagctgtcgccgatcttgggcatgccctgctccgccacaaagtagccttggtcccacaatgacgtgaagccctcgaggtagaacgagcccgccgcagtgccacccgtcgcgcactcgccgtcgctctctccaggcggcttgatccacatgaagtagtccaggttcgacacgcccgtctcggatgtcggcggcttgccaacaccagcggtggggacgttgcaccagtcgctgttgggggagccgttgtagttgcgagacgtgtcgacaatgcacctcatgtcgctcgagcccatggccgactggaagttggtgcagtacccggcgcactcgtcggtggagcggtagttggacgtgttgatggtcacgcccttgacgcggccggagctgccgagctccttcatcacggtagcgaccttgctggcgctgtctccgtacgcgagcatccagtagccgacgtccacgtacagctcggcgttggcgttcgcggacagcgctgccaccgcaatcttgaggttgtcgaggtaccccgccgacgcgccgcagcctccgtcttgcgtgaggagacccagtgcgtccggctccacgacgtacagcaccttgcggtcgccgacgccgtccgtgagctccttgaggaaggcttggtagtcgctcgtgctggtcacgcttcctcccgacgacagcccagctgcgcagtccttgttggggatgccgtagaccacgatgctgaggcgcgtgtcctcggagcactggctcagcagccccgacaccatgtccgagcgctcttggctgctcatgcgatccgtgtaccacgacgcgatggcgtacttttccagcgtctcgatagccgtcgtgagctccgggtggtccgacttggcccccgtgtacgacgctggcacgatggagcagaggtcttcagcagcggcaatggaggacgacaaggcgagcgccacgcaggacacggcggcgaccactagacgcgagtgcaggatcttgcggagcatcgtgctgcagcctcactcacgcgttgctggatacggtttggtgtggtgcttggcaaattgcagaatgaaacattggtgcgcgggccacagaccagggcggcgcgcaactaattagcaagacgatggtacgctgagtgatcggccgctgagtgtagcgttggttcgagcctccaccgctggtggctctcggtgatagtggtcgtttctgggggcaaagtgtcaagtgcagctcttggttgtccgaacttcgaccgcagccctaataagcgcgctacgaggacgcgttgccctgctacctaagaccatgcgtgtgagcttgagttgagttgaggctttcattgttcgtgcgccagctgctcaagcggaacctgccgaaacgcgaaagttgttctgccacgcacgcgatggtgcgctcgagcgccggtgaaacttgacggatcctcgaatgtttcgcgctcgccgcccgtcgagttcgacgcgccacaagggcttcctctttcatttgagtgactggacgcaccccggatttcgagaccgtttctcgcggggtgactagacagtcgtcggaaccagatggtcgtaacttcactcctgaacttcagagttgaggcaggcacgcccgagctcgtcatggtcacgggctgcacgccgcggctttgccagatgcctaggcgctaggaaaaggattcggtctctccttgaatcggttcacgcagtggtctgctgccgcttccggctcctccttatctgcacgaagctcaccaagatgagaccacaaagaccttggagacaacttcaacatgtataatagatccacacatgcttcgtctcgctcggtgtctgattgtgtcagtgcaacgtcgcctatgtaaatgagaggtattgcagatatccaggtttttatggctcgctgggtctgcccaccgtatcgcagctagagcgaactggaagcgcacacgtacaagttcacaacaatgcacgaacgctacttttatttatgaatttagtgaagttccaatgaatctacgtttgcaatgagacctaacaaaggggacctgggcggccggacttgacaacatggcctcggggagcttgagaacaccttacacaaacacgccgagcccttcatctacagcttgcgcagacgcttcttcgccttgcacgcggcgctggactgcgcagtgctcgtagaggttgagctggtcgcagtcggcgtcgtggttggggtcgcagtggttgcagtcggagttgcggtcgtgctcacgggggccgtcgtagtgctctgagacgagctggtatcggccggggcgacagtgccagctgcagctgattgtccggtactgtcatagtcctgagcgacagaggaggcctgctggactgcggagctgcccgtcgaggtctgggttcctgattgactgctcatttgagtggccgtctgagtgccggactggctgctggtttgagtgctcgtctggctgctcgtctgactcgtgctgttgctgccggagatcgtggccatgccctgctcgctgacgaagtatccttggtcccagaggagctggaagccctcctcgtagaactcgcccgccgtcacgcccgtgagggactcgctcgagtacgacgtgtccgtgcagatgccgtcgctctctccaggcggcttgacccacatgaagtagtccaagttggagacgcccgtgtccgatgtgggcggcttgccgatgccagcagtcttgacgttgcaccagtccgaggtaggcgagccattgtagttgcgggacgtgtccacaatacacgtcatgctggcggagcccatggccgtctggaagttggtgcaatacgtagtgcattcatccgtcgagcggtagtttgacgtgttgatggtgatgcccttgagcgtccccgaggcgctcagctcgttgatgatcgttgccacctcagcggcattcgtcgagtcggccagcagccaatacccgacatccacgtacagttgggcgttcgagttagcggacagcgctgccaccgcgaccttgaggttgtccaggtacccggcggacttaccgcagccgccgttggccaggagacccacggcgtcgggctcgacgatatacagcaccttgcggtctcccacagcttcggtcagttgtgagaggaaggactggtagtcgctggtgctctggaccgtatcggaagacgagagtcccgcgttgcagtccttgtcggggatcccgtagacggcgatcgtcatgcgggagtcctccgagcactcactcgtaaggctggagagcatggtggagcggtcgctgtccgagaggcggtcggtgtaccaagcagcgatcgagtactgctcgaccgtctcgagcgcggtcgcgagctgcgggtacgtggtcttggcgctggtgtacgaggacggcgtgatggagcacagatcttcagcggcagcagcgcccaggaggcaggaccaggccacggcggccagcgcgaacggcgagcgtaggatcttgaccatcttcgagactgtggcgctcagggcaaattgtggaatgagcttcgtgtactaccgtgcgcgggcatcggcatgcacggagatggccatgcgcctgctgatgcacgaaggcgcggagggcggatcgggaagcctcggtggggctctgcagctatcgcgcgctgatacgcttggacgccagcgccatccggtgaacactgtccgaatgggctgaccgcaggcgcttccagcggccaagatggtgatcggccggagtctgatttgttgtgccgtcgtgacagccgtcggaccactcatcaagctgtcagctagccaggacgtgcactcagcgccacgtgcggagccagatggcgctgaggtgcctgcagcgctgaaggatggtctggcgataggagccgccgagtgccaagttcactccggcccgagctccgatgctatcgaaacccagcgccgtctcagggccgcgctgaagcggagctatagtacaggctggtgagtgcttcgcttgctgcttgagacggcgctgaccggcgtgacgcctaatgaagcgagacacaagatcgcatccacgcatttcggtgacagcacttcaacgaactgaactctactgttggactgcgggaagtccacgcttgtcttgacgacgaggcggcagatccaattgcacacttccacacgcgccgatatggcgcgagtggctggcgtcgggcttcagcagcagcgaccaggccgccaccaacttgccaggcgcgctgcccttacatgcgtcggagtgctatgatggagtgcagctctacagtaagtgtacttatctttacgtgcccaagaaactactacgtcatttttcacggtttacattagggggtttcaaagttggattttgccaaacatattgacctgaagacatgaaaatttccagccttcctgattggctgtttcaaaagttactttgaacccccttttcccaagcaaacataagcccctaagcggctgtgcgtcatcaagtcgagcacctgcaaccaggccaagtgcaagtccacaacagtacaagacgagcgacgttgtctagggtaagtacaaatgcactggcgtcgtgattcaggccaacaggagacacgagagcgtcgagggtaagtatgtgtggcaagacataaagcagaagaaggtcaaggttagcaacagcagcttctacatcaagtctagcaccagccgtgaggcttggaccaagctcagcggccggacggatattggctgcacctgcgcggcgtgccatgtttcacgcagccaacgcgcattggtgtgtgcttgacgccatgggcgctagcgctggagccgcagttggcgccttcgcggggcgcgcgctactggcggaataagcctttgagatggctagattagccgtcggattccaagtcaataggctcttaggtcgttgactgattttgcgtcagtaaaaattactgacgccaaaatcgagtccaaacgacctacagacaacgacttacaaagccggcatgcttaatgccatcctcctatataaaaacaacgataaattccctcccgtcaaatctgaaaaactgtcataaaacacacggtgtgttgcataaagtacacaagaaagcatataaagtacacaaaaccagatggtatacaaagatgaagtcatttgattgaatctgattggctggtttgctcatgttaagctttgcttgtgacataacggcaaaaccgcagcgcgatatgattggctgaaaagctgtttatgttcttgtgtctatagactcagcccaactttgaaaccccctatttactacagtatgaattatacatctacaaattgcgtctacgcagcttggccttgcaatccgtgctcggcgcagtcggcgttgaggtcggagctgtcgtacttgtcgtgggggaggcgtttggttcgcatccacgcctggagcgggagttgtaacgctctcggacgagctggtgtctgccggagcaacagttcccactgcggtgctatcatcgttgatgaggtttggtccacgttgctgctcgctgccggcgcttcggttttgctgctggtttgatcgctgctctcgctgctcgtttggttaacgtctcctgtgccgtccgcgatcgacttcataccgccctccttcacaaagtatccttggtccattggcttggtgaagccgtctgcgaagaatgaacctgcagaggtgccgccgttgcactcgccgtcactctctctaggcggcttgatccacatgaagtagtccaggttcgagatccccgtcttggacgcaggcggcttgccaatgcccgcagtggggacgttgcaccaatccgacgtaggcgagccattgtagttgcgagaagtgtcgacgatgcaggtcatggcactcttgcccatggccgcctggaagttggtgcagtacgtagcgcactcgtcgttcgagcggtagttggacgtgttgatggtcacgcccttgacgttgccgctgcttccgagctctttcattatcggagcaattttggctgctttggccgagtcggcgagcacccagtacccgacgtcgacatacagctcggcgttagcgttcatgatgcaatacagacgtggtattaccgttaatacatattttgatacaaatcatattggtttagtgcccttcgtattttgaaggtcgtcgacagcgcttcaaccgccaccttgaggttgtcgaggtgcccagcggacgatccgcaactgccctctttagcgagaagaccaacagcgtcaggctcaaccacgtacagcaccttgcggtcaccaacggcgtccgtcagctccttcaagaaggtcttgtagtcatcggtgcttttcacgcttccacccgacgagtagccggcgtcgcagtccttgttggggatgccatagaccacgatactaaggcgggtgtcctcggagcactgctccagcatgctggaaatcatggtggagcgttcagcgctcgtcatgcggtccgtgaaccacgacgcgatcgcgtgttgctcaagcgcttccaaagccgttgacaactcggggtggtcagtcttggcttgactgtcgagagagcaagaagcaagtcaggcagcggcctggaccatctaggccctgccagatctggtacgctagaatgggtctagatggggggtagttactcaaaactttttacgaagtttgtgtacaaccgatgtgcaggtgatatccttgacactccccctgcggcaaacagtcagttgttcgtgagggccgacatctgattcaggattcgttctagatttagagcaacatcagcagctcaaacactagcggtactgactgggtcttcttactctgtaaaggcccgacggcgttggtttagagacttcagaacccgttctaaaattaggagcagtcaaaagaggaccatggtgaagcccaagcggctcccgctgtacgagtcgcgcccctatcatccgctgatgagctttcggatgatgaatatgtaggtagtgacgatgtttgcagtgaggacctcagtgatactggctctgcgggcgaggggatgcacgatgacttgttctcgtcggacgaggagccggatgagccatactgggacccagaccccacgctgcgtcgggacgtttggcagatcgacgacttcatcatgatcgagacgctcaacgagaaggagggcggcatctctatcagtaagaccttcgtcagcgtgctgtgggattggcgtccgaagcctgccagcaaacgctaccgctcgttgaagccgctcgagaatatgttagagactcaccgcaaggagtgctggctggcactgcgcttcaagaacagcaggatggagcacttccgcgagttttgcaagactgactggtacggcagggccatcattgctgcgggcgaggactactcctgcatgtttcggtctatgacagttgcggtcaaccttctcaagcgccccaacctggttccgcagacggtgatcgatgatttcttcgccgaggctaagagcaagttcgacgtggacatgaacccgggctgcaattggaagcagttcacggctttcctgcgcaagctgcgccagcatgggactgcgctcaagattaacgagatgatcaagaacaactacgtccaaggagggcgtcgcgggccgcgtgtgttgagcgagctgactccggacaagggcgttacggatggactgtacatcgtggcggcttacaacgtccgattcgtgggccatgcagttgtgcttcacgtggcggacgggggccagcgcaagaccattatcgacaagggcaaggagaagcctgtggaggagtgtcgctggatgaacttcttcgcatttgtgcgtccgttcagagtctggtaatcgcgatggacatgtcgggagaggatttcacggtgggttttaaatcttcagacaataaactaaaatgctctcaccattaaattgttcttttatttatcatcaaagtgcaaagtcttctataaattttccctcattattgtggtggggacacacgtaatagctctctcattttctcaaatagtggcttcgctaaaggtttagtgaagatgtcagcgcacattgcattggtgttgcaatagctgacagtgaactccttgcgcgccaccttctcatgtacgaagaagtacttaatgtcaatgtgtttgctcctgccgtgaagctctgggttgttgcatatcttaatgcaactttggttgtcttccatgatcagtatgggctttgagctctcgtagcctagttctcttagcagtagttttaagtagatcagctcttgcatgcagtagcagagtgcgatatactctgcttccgttgtggagagcacgactgtgtggtgtctccgtgagacccagctaatgggactgttgcagaacatagtgatataatcaccgatgcaacgtcgtgtgtcttggcatgctgcgtagtctgagtccgtataagccatgagatattcatctgactgttggagctcgaagttttccactccaccaagagtgatgccaaagtcttttgtgccattgaggtagtgacggccatgctttacagcattccagtgaggcagccctggattgtcggggtactggctagcttcacggatgaagtaggcaaggtcaggacgagtacccgtcatcaggaacatgaaactacctacagctgctcggtacggtttgttggccatcatatccttactatcgtcgtcggtaggacagtcggtggcactaagcttctgcgcgattggcgtgctctttcgttgactgtctaacattgagaatctatctagcacattggtggcgtagctcttttggtggatgaagatggagcggttagctcgggtcctttccattgtccagccaaggaggtaggatactccccctaaatcggtcatgtggaactcggaactcagggccgatttgacccgagcaacgacatgtttggacggggagatgatcagcaggtcatcgacgtaaaccgatatgtaacacggcgcattgaatataaccttaaagaatacgcaacggtccttaactaggcgagtgaagccgagacgttcgagatacttagcaaaggtgtgataccagacacgaggtggttgcttgaggccgtataggctcttaccaaggctgcatacgaggccagggcgatcctttgaggtgaatccctcaggctgttccatgaagacttctacgtcgagtgaaccattgcggaaagccgttttaacgtccatctgttcaattgcatagtcaaggattgctgcaagcgtgagcagcagtcgaaggacttccatgcggacgacagaagagacgatttctgtatagtcgataccgtacttttgctgaaagcctttaatgaccaggcgagctttaaagcgcacaacgcgaccagtttcatcgcgcttacgcacgaaaacccatctgcactggagcaccttgcggttgtgcggccgcggcaccagtgtccacgtttggttttccatgagcgaccgatattcagagaggcagcagcgtgccagtcagatgcatgtggggagcgcatggcttccttgtaggtcttagggtctgggtcatagcgagcagctaagagagtaatgatggtatgatgaagggtatgttcctcttccaggtctatgggctcgttgaacagtagcgccttagagtagatggtgagggcgtcttttgtcttaaccttcttagcggaaggggtacacacgtcagcatcagtggccaccagcgaggcttggttgcgttttagtagcgcacttaggggaggcaggagttctttttgaacaggcagggaggtgctgagagggtttggagtggcccgttctcaataggtgaggttaggaaatgtgtcctctttgaacgtgacatctcggctgtaaatgattctgttttctgtcgtgccgagaaggcgataccctttcttgttttggggaaggcccacaaacatgcacagtttagcgcgcgcctctagtttgttgcgatgcagctctggtgtaagagcgaatgccgcacatccgaacactttgatgtacgtgagagatggtttcgtgccataccagagctcatagggagtgacacctttaggaagcacactactagtagtcaacgcacacgttctaggatagtgcgcatccggcgctcagccacgccattctgttgaggtgtatacgcgttggtgaacttggcatgcatgccatagcgatcaaatatgatctggccgagcttttcgtactccttaccattgtcgctctgaagtcgttgcacctcagggtcatactgattgaattgggtatccagggtaccgacctcagtgttgaagcggtttttagctgccttacggaacttctcatagcaatcgtacaagtccgacttgggcgcaacgacatataggtgcatgaagcgcgagtagtcatcaatgaacgtaatgaagtagtgagcgccacttaggcttgggtaaggcaaggggccattgatgtcagaatgaactttttcaagagggaatttagagcgatcaacattgcatttgaatggagcacggtgtgcgttagcaaagatgcacgaggggcagaagtgtttcgggatcgcggatgcttcagagaacgccagttcaggggccgcttgggtcctagacatggtctgcatcacacgaaagttgggatgaccgagacgcttgtgccacaataagacagcagggtccatacctgattgagccataagggcattggcgggttgatcgtccgcaggagctggggccacgagcgctctgggcgtcttgagtgggattttcggcttgaactggaacaggttcatgtccgacgcgagttcgacgtggacgttgtagtccttgcccacgaagaaggtgcagcgagtgctgctgaccacaaggcgaatacccattttcagcacctgggcaatggacaggaggttgaacttcatgtccggcacgtatagcacatcacgtaattccatgaggcgggtagtaccggtagtgtcaaccacctcgaggaccacatcaccaatgccgcggatggctagttggtgcttgccaccgaccatgatggcgccggcgtaggggcggatctccttgaaccaggcctcttggtaagcagcatggcgagtgcatcccgagtcaaccgtccacgtagggtcatgggggtcagagctcgtagccgacagaccgatgtccggcatgatgacagtcgcataggcgatgagccccgcttggcgtcctcttgagctgaacttgcgctggaggtcctggaagttgaccgcgttgccaaagcgatcatagatgtccggaccctagaacccattctcattgcgagagggtgggcgctgccggtcatccgagcgttgggtgcgctgctgcttggccgggaaggggttgtggtcatccctcggcttgcgatcgataatgccaaagttcgccgacagcactgtgccctccttgacagtaccagtgcgcaggtgcttctgcagcacacggcagtcgcggatggcgtgatttggccgttggcagttggtgcaaccttgagaacgacgaggcgggtcgtctcggccatgaggtgtgttcgcaatgacctgaagtgccgtctcgctggccgtggcgggggtctcggggctgccattctcaatcacgtacttgcgcttggcgtagtcatccagcactttacgctcaatgttggtcttgaggtccgtgtacgggataaacttcttgctgcccttccaaatcgcaaggtcaggcttccaggtactaggcatcgcatgatagagatagagtgacttctgttcgtcagtcatcacaatgccagtagcttcagcagccgccttcagtgcgcgctcgaaggtcaggaagaacgccatcagatccgtaccctcctcgtacttgatggtcaccaagtagtggttgatgtagtacgggtcgccgtgggcagtcgagccctcatagcggtcacgcagcttttggtagatcgagtaggcagaagtacaaccctcgacgaggagcacgtgggcatcatcgattgttgagatcaggaacgatcgcgttttgcgctccattcgacgtctttcgtgcgtgctcggcttgcgagcttcttggccgctcggagcttcgctcgagccttcttggcctgtgcgcggagcagtgctcggcgtctttccttgtcgcgcttggtctcggtgaaggacttgatcaccgggggcggcggggtgggcttggccgagcgagacgactgagggtcagtcgccatcgcctcagaggagttgcccgacgaagagtccgacgacgcgccggacgaggagccaggctttggttgggacgtgctgtcgtcgcgcttggcgtcatcggcgtccagaccgccgtctggagacagggttccggtgtcggagagcaggtcgtccgacttggtgggcgagggtgggtgggaaggcttgaggtcttggtcgtcgtcggagtcgacgatggacgagtccgagtcaccgtcgtagtcctcctggtcgatgaagcctagcaggccatgaccgtcgagagctgcgcggatgcgagcgttccacactgggaagttggagccgttgaggcgtgggaagtcttccccgcttctccctatcgttgggcttacaacctgtccagccatcagcttgagcacttgcgcaggtcgaagacgggagagaaggaaagatgtagacgtagggaagattggaaagtgagatgtagtcaggttagcgagagagcaagaagcaagtcaggcagcggcctggagcgacgacgcgtggccaaccatctaggccctgccagatctggtacactagaatgggtctagatggggggtaattactcaaaactttttacgaagtttgtgtacaactgatgtgcaggtgatatccttgacaggcttcacgcccatcttggttccttggaacggctctacagatctgtcgaacagcggatagtctcgttctccacatggcggagtctgcaagactcatcgtgaggcaaggacacctcagaaaaatggagccgcgcgaaaagcttgcggctacataccggtataatacaatctgtagcatgttggtttcgtagttagtatcacgcgcgtcagcagcaacaattgcaaacggtggccgcgctctctctctcaataacgttacggcggaatgtgactttgcataacgtgtttttgcctgtaagctgacctcctgcgatggaaacggcgccgccaaagagcagaccaaagtcgagagactgctctgttgccatgcggcgccctcacccgttcaggacaacacctcgcgcgcttgttgtccgaacactgcaaggccgcgcatcaagttgatgtcagcaaaccagtcacagccccacctgtgacgggacacacagcacttcctaacagaggaagcaggagtatacaaactccaagtgaacagccgttcacgtgtccctggtctgaaggggacgacttgacttgaaaagcggtagatctaagactgaatgtatctataggttggtacagatttggcctgcatacaaatcctaagttccctatagtttgtgtcatacaaaatgtatctgttggctctgaggccacttgggtcactatccaggggagtgaccgatgtagccatcccggaatagtgacagggtcactattccatgtaaccccgttacatcctcccccacttagattcgatcttatcgaccaatcagagcgaggtaacgccggcgactcacatttcactcgcaaagtcgaaattcatcgacaacggcgcgagctctggcgcctcggctcccgggcctcacagagcaactggcgcatcgccgagcaagccgcagggtctccacgtcgaccggaagcatgcctccaaagcgcagtgcgcgcagtgcgaaagcaccttcgaaaccgcgggccgtagggccgaagaccagggcggccaaggccaaggacgagtcgtccgcgaggcggccgaggaggcagtgcgctcccgtagcagcacgccggagggcgggcctcggtctcggagtcggagcaagactcccaaggccacgccaagtggtgaggggagctctcggccccagtcggagcaggccaagccagccttcgactggtcggccaacatcaagaactgcacgctggttgtgcattccggtgagagctcacccgagggcagcgacaacgctgccaaagacgaagcactggcggcgagcagcgcgcccagctctccgcctttcccgaacgctccgtccgagaaggaggccgaggacgtcgagtccagcgccggcgtcggcgacagcaagcaggcggaagaagacgatgtcgttatggccgacgcggaggacatggccgagaagtcgtcgagcgacgcgggctccgagcccaaggcggtgtcgccacccaagcatctgacgctggcacaaggtcgtgagcgtgcccaagcgtcgaaggcggctgccgctacgaagaccgaagaggccagggcgaagaagcgtcccgtttccacgtcacctcgcggtaccagctccaagctgttcagcgactcggagtctgaggacgaggagggtgccgtccatgagcccaagaagctctccaacgacctcgacgagcagcaggagcagtaccacgctgctcgttcgggggcacacgccaggcagtcggctgccgcgactgctgtcgagtcttcgtcaggcggtagtgccacgtatccgcagggctacttcccgcccgagcctggcactggtgcgccgcacccgacttacgacgtgaccctcgggtgtcttcgtctcgtggcgccgccttgacgacaccaccgatcttctcgatctcgtgcggaacttggttacccgccttgtccttgagcggaacttggttacccgccttgttcttgagcggaacttcgttacccgctttgctgggtggaactatgttacccacctcgccgtgtggacttggttacccacaccaggagcgcttccagcgactcccgcatcagttatggtctgagtgacctcctgtggaactatgttacacacatcggaagcgcctgcagtgccttcctcatcagttatggtctgagtgacctcgcgtggaacttggttacccacgccaacgccagcggcgccttctccagcagcccttgctgcctgcggtacttcgttacccgcgtgtggacctacgttacccacctggtaggtgctgtccggcacctccactcttaggccttgtccggcccggtcggagtcgtcgtcagtctcgacggaccccaagaactcattagacgctgctgcgccctggcggccctcgcgggcaccccagctactgccagaggtgggaacatgactcaccacagctctgtcagagcgtgggggacggctggccccgatggccttgccgcgccagtcgatccaaggctcgtgtttctccagccacggcatgccaaggatcaaatcgtacttgtccatgtctaggaccaagaacggctccgtgctgtcgaagtcctcgaacttgacagtgaggtccatgtggacccgaggtacttctaccaccgtaccgtcggccagtcttaccgagaccagcccgttatgtttgctgcctcgtagcgcatcggcgtacttgtcgcgattgcgtgcgacagtctggcggcgcgcaaagtttttggacgccctagagtcgatcaagattctcaagggatgatcgtatcccggtacactcgcgtgcaccacaagcagtccaccgctgcccttctccgcttcgagagtacagagactctcaggggctaagtccccatggcgtgcgccacccgcacgcccctcatgaagacttagtgtttccccagtagggcgccccgcccctactggtgcccggcgttcccctggtcctggggcgcggcttctgccagcaacccctagagccagagggcttcgaacagaacttcttcttcagtcctcccgcgggacaagcacgtttcatgtgcccaagcttgccacagccgtagcagcgaatgtcgctctgctcggccatgcccagatccatgggaaccggcccgttgatcgctccattgccggagttaccattaggcgcaccaccagaggcagggttgctctgccataccgtggcgggggtacgagcctgcttgtggctgtactcctcctggagggcgatctgaatcgcctcctccatagtgtttgcttgcacacggaacagttgcgtgcgggcaggaccgacacgcagaccgtccatgaacacggtcaccttgatgtgttcaggcagggggttccccaccaaagaggcagtgagcactcgcatctcctggatgtattcatgcagctcgcaccttccttgtttgcaggcgaggaagcgcgaactctggtggtactcgtagttcgccggaagaaacgcggcccgcagctgctcgcacagctgggaccatgatgcgaagcatccaggcgtcgtcgcttcgcgcgtatacgcccaactcttagcgcgaccactaaggttggagagcgcaaaggcgacacggagtcgctcgtccgagacgagagccgcgtccatcgcgagctcaacctctcgaacccagaagtgaaggttttctccttccttcccttcgaaggggtgaaccttcagccgcaggggcttcggttgcaccgacttcggcgcggccgcagtggcctgcagcccttgaacgtgggcgatgagccctcgctcgtaggtgtcgaacgcgttgatacgctcaacctgctcagccggcgtcgccgccgctaagctacacagggcatctgtcccaaagatgcctgccatcttacgaacggactcgtactgcgagtcgttcagatgaggaaactccgtccgatccatcttggctcactcgatgagaccacaaaggattcaggtagtccaatctacccgcgtaggcgtaggattgactacaagtgctaccaagtgtgacggggcacacagcacttcctaacagaggaagcaggagtatacaaactccaagtgaacagccgttcacgtgtccctggtctgaaggggacgacttgacttgaaaagcggtagatctaagactgaatgtatttataggttggtacagatttggcctgcatacaaatcctaagttccctatagtttgtgtcatacaaaatgtatctgttggctctgaggccacttgggtcactatccaggggagtgaccgatgtagccatcccggaatagtgacagggtcactattccatgtaaccctgggtgaagggcgtgtcgtttagcgccgggatcatttctatcgctcacaccacgtaagctgagcgcgatgtcgctcgcgacttgatccatgcgagttacacgcgtcatgcattcatataacacatttccttggccaggccttcaaagtaaggttgaaagaaatatgttatttgaatactttaatacaggataacgcagttaggttcatgcacaccgaacatcaccgtagcagctacggagtagctcgcatttcatgagctcagtaggtagcacgcagcacgatcttgccacacactttcttcgatcctagcttctccagcgccggcagcagctggtcgaacgagtagaccgagtcgatcacgggcttcaacgcacccgacgacacgaaacccgacagctccttcagttgcgctgcaccatgatctcgccgatgcacttggcgccgaacttggctgcgcgcggctgcagcatcgggttgatggtcacgaagcggcccgagtccttcttgagcacggtctgggcgtcgcggttccacgccttgcgctccacgccgcagtcgtacacgacgtcgaccgagtgctcgtttacggcgtcgacccagctctgcttggacgcgtcgatggccttctcggcgccgagcgactgcacgagcaggaagtcctggcagcccctggccgtggcgatcacgtgggcccccatggcgcgcgccaactggatggcagccatgcccgtggacgtggatccgccgaggatgagcacgcgctcgcccgcctgcaggttggcgtgttcgtgcagcgcctggtagctcgtgagcgcggcgtacgggatgctggcggcctcctcgaacgtgacgttgctgggcttgagcgcgacgaattgctcgtcgatggcgacgaactcggcgaaggtgccgaagttggagtagggcgccatggcgaagacggcatcgccgaccttgaactggtgtgcgttggcgccggtctcgacgacggtgccggcgacatcaaagcccatgccgaagggtttgccggcggagggctgacggccagtgacggcgagtccgaagtcttgcatgattttctggtcagcggggttgagtgcggcgctgtggaccttgatgcgtagctggttgggctcgagcgggatcagcggcgcgtccttgcggagggtgagctcggttttaggtgcgccatacttcgagtattggtaggctgtgtaggttgctgacagagttgagattttacctacgggtttggatataggagtagcctgagcaattactgcttcttgggatctctggagcacggccatcgttattgtttggtactggatgcttgctcgggtgagacttttgaagaatgaaggctgctggctgaggcttgacagctatcaataggcatccggcactcgatatttttttatgagcaatcgacgatgcattcttgtcgccgcatagatcaagtctgaaactactccacatgacgcccttcactgcgtgcggcactgtcgcggactacgcgatctttgacgaggagctagtggctctgaagcccaagaacttgaccttcgaccaggctgcgagcatcccgctcattggcctcaccagctaccaagctctggtggagcacacgaagctccagaagggcgagaaggtgctcattctgggcggcagcagtgctgtcggcatgtttgccatccagctggcccacgccattggagcgcgcgtggtcacgactgcgagtgccaagaacgccaactttgtgaagggcctcggcgctgagcgcgtcatcaactaccacacgcaagtgggcggaagagctggagacccactcggtggacgtgatctacgactgcggcatggaggcggacgcctggaacacggacgctcagttgattctcaaacagaacgcgttgtctgctgccgctcacggagccggttcagccggcgaaattcggagccaagaactgcggcaacttgctggtgtacccgacggccaaggggctggatgagatcacggagtacttggagaagggctccattgtccccgtgattgacactgtgtacgagtttgagaagctccagccggcattgacgaagctgaaaggcaggcacgcgcgcggcaagctggtgatccaggtgaacccggagagtcaagggtaaggcaagagcccaaccaagcatgtactgggcgcacttcccaagatcgccgaaaaaggcactgagtaatgaaaaacaagttgcatctaagttgcatctaaggatgtagtattgtttcaggcaagctagtacgttgatctaccatctctttacgatccgaaagctccttgcagggaatcaattattcattgtacactttagctatgtaaatatgcattaggctttcgaagctcagtgtgccatgcttagcacgatcttgccacacactttcttcgatcctagcttctccagcgccggcagcagctggtcgaacgagtagaccgagtcgatcacgggcttcaacgcacccgacgacacgaaacccgacagctccttcagttgcgcgccactcgcgtgcaccatgatctcgccgatgcacttggcgccgaacttggctgcgcgcggctgcagcatcgggttgatggtcacgaagcggcccgagtccttcttgagcacggtctgggcgtcgcggttccacgccttgcgctccacgccgcagtcgtacacgacgtcgaccgagtgctcgtttacggcgtcgacccagctctgcttggacgcgtcgatggccttctcggcgccgagcgactgcacgagcaggaagtcctggcagcccctggccgtggcgatcacgtgggcccccatggcgcgcgccaactggatggcagccatgcccgtggacgtggatccgccgaggatgagcacgcgctcgcccgcctgcaggttggcgtgttcgtgcagcgcctggtagctcgtgagcgcggcgtacgggatgctggcggcctcctcgaacgtgacgttgctgggcttgagcgcgacgaattgctcgtcgatggcgacgaactcggcgaaggtgccgaagttggagtagggcgccatggcgaagacggcatcgccgaccttgaactggtgtgcgttggcgccggtctcgacgacggtgccggcgacatcaaagcccatgccgaagggtttgccggcggagggctgacggccagtgacggcgagtccgaagtcttgcatgattttctggtcagcggggttgagtgcggcgctgtggaccttgatgcgtagctggttgggctcgagcgggatcagcggcgcgtccttgcggagggtgagctcagagattggtttgatgaagcttgtatactggtaggcgcggtatgtaacgggaacgatgtcgaggtaggtaggctgggatgcagcgagaacggtcatggttgagttgagatcgctagagttgttgcagtgacttgttcacctgccggcgagatgtggaatgagcgctaagccgtagcacgccgcgtgcatcacgcgagtgtgggggcaaatcctgcgcgcgcgaaggggttcgcctgagcaatcggtatgcggtatttgcgccacacgtgatcaccaagaggcagcgcatgtctatctctcgcattttagtcggggatgcatctcttaactctaggacgagtggctgtgtccctgctgctctgagactcaaagttcccaacaccatgtattgggaccaagcggagtgcctccagtctgaacggcatcaagcaaaaagctcatgcaatgggcatttccggataatggttgagtaacagatttgacaggtaaatgtgacaaggccggggtcgccacaagagacacgatcgactaccaaaaagatcctgcacgaagcagaaaagcaacatccacagaggaatcctaggcggcggggcggcgcttgtcttctcgtcaccacgcgcatcctatgtgagatcggtgcgtggtgtttgaatctcagccagcgcaaaggcgcgatagcgtcatgtccgcgcgcaaggtcgagcctgcctcgacggggccttcgtatgggcttctggtgctggccactccatcctggagctagaacctggagtctccaggttctattagcactcgatgtgaaggcgctacctttcctgctacgaattgattaatgaagcacgctcgtacatagttttgtcaaggcggcctgcccgccgagatcgccgaaaacaaaccagaaaggctgagggcaagctctcttcgtgtgagtcagcgggtcggatattttgccagctcggaccgcagaacactctctcggtgtgcaatggcagggtttcacttctgtcaggatttgctacacccgctccgcccgacggaaatgaccacctgacagaagcagaatgccggccatttttgaccctgcggttgtgtggtagataccggtatccataatgatagcacacaaaagctcggtaaacttgatgtgaatttcgagaatacatgcgcaacatattcgtgtctctcgcaaccgcgcgtcgcaagcgtcctttcgccgggcatgcgacctctcgcgggcggatcgtagccaatcaaatgtggcgcctcatcaccaagcagaaaaacttcagtttgggggactgttgtcgaggcgaaggcaactcgaggatgcccggcaaactatcattgataactgttggcgggctcggcatgtatgcgtgaggaagtcggtatgtcgtgcaatctacatcacagtacagtacatgtgcggtgaggcggcacgtcgatcgtcgtagacatctgacgctgaatccacaacggacgcaggatctacaacggacgcatggcgatccttgccaggagtcgccgtgctagcagtcgttctagaaaccaaccggcaggagcttcgcgaagctgcattcaatacactatcgcttttgcattcaacagcacaaaagaccacaaagtatactttggttgcgagcagttcgcaatcgatagtcaagtagaccaagatgtcgtcacgcttcaggctggatagcgacggcgacgcggagatgacggttccgcagccggtctacgagtacatcgtgccgccaaagctggtcgactgggaccaagcatcgctagtgaagtggcggagggcacgagagcagtatgaagagaacgtgagggagcgctgcgagtggacgggcgaagactacaaggccgtcgtccggagtgtacgcagtgctattcatcctaacatgatgacgttcctcgctacgtacgagattggcaaggacaaggcgcagatcacggacgaggacatcatgagcaaggtcaaggagaggtgcgagacctcgaatcgcgactaccttgcgaatccctcagcgcttttcgctcaacagctaaagatggacctgacggtcaaggatgtgcctgaccgtgtgtccaagtatttccggcagttcgagaaaatcattgccgacaacggcttccacgagaatctgggccgtggctccccgacagacgatgactatgtggcacggatgaagcagaggaccaagattctggtcgataacctgtcgccacccatgctgcgggacgagatcaaaaggatgctggagttagtcaagtttcgccacatccgcattaacgatcagttactgtacaaactgatactcgagcgtgctgagctgcagcaattattctacaatcgtttccgacaagctgatgctgcgcacacaacgtccaaatcaagtaaccggaagagcggcaaggctgtgtctgtgccggggaataatcgtcgtgaaacggtgcaacagagcccgaagggcagcatccaagcaacgctacacgcaggaggcagcgacgttgcacggccccaacaaggtagtggccctaaaggacgaccgccgccgcgcacgggatgcctgcattgtaagggagaacattggctgcgggattgcccggtcgccacacctgatgagaagaaagctgcacgggaggcatagcagtccaagaattggaaggtgaagagagcggtcgttggtaagcagcagaaatgtgggggtggagcagaagaaggcgcatctccagcaaaaggcagtgatgacgaggagtatacagtccttattaacggagctgtggagatatcgatgtgtccagacacgggagcagacaagtgcattctcccggcggatgcagtgaaccaggtgcgggcgatgggccgcacacttacgactacacgcctactcgaacctgaaccagtagaaggagtcggcggcaatgtcacattttgtcatgaagcagcgcagattgacgtgcagatccgcacgtctgcagggccagtgaatctctacaagctcgactgtctggtggtggaaggtgaaaaacaattccttctgagccgaaaagtgatgaaacgactgggcattgacgtgaagcgcgcgttcgagcagctcgcaaataccagtattgagcttaatcacgatgattttcctgatgaacctgaggtgggtgaaaccgtggatgcagagattgagtttgagttggatcgcatgtgtgaggaggtgaagaaggtgctaagtgactcccagtacaaggactttcgagatgatgtaattatgctcagcagggagttcagcagactgtatcggacacggatcggacatgatgagccagcactggtagaacccctggttctcacgctgaagaagggagaagagcctgttcgctgcaagcctcgcagatatcctcctgcccagcttcaattcctcgaagtccacgtcgctcagctgcttgagttcgggttggtgcgaaaaaataatctcagtaagtgggcgtctaatgcagtgccagtgctgaagcccggtagtagcggagacttcagggtgacgaacaactacatcaagatcaacaacaagacagtgccaattgcgggtaccatgcggcacttctcgattattttgaagttcgtctcgggcgtgaagttcattgccaagttcgatatgttcaagggattctggcagatcatgctcgcggaggagtgccaggagatgttcagctttatgatggtgtctacacgccactatgtgtcccgcaaggagcgacagattccgccttacatttccagaatcagatgcagacagtatataagccactgctgtacaaaggagctctcatctggattgatgacattattgtctacggccggacggaggaagagtttctggcgaacctgagactgttctacgagttgacggccaagcatcgcctgaaattgaacgcaaagaagagtgtgctgatggcgtttgaggtgtcatggtgcgcccggatcatcgatggccaaggcatccggcaggacccggagcgattgtcggctctagtgtcgttgccattgcctcaaacggcagccgacctccagcgttttctgtgtgcgtgcaactggattcgagacagcgtgattgactttgcacgagtcttcgagccgatgcagtcgaagctcaatggagcgctggtgaaccgcagcagaaacaagcactagagcagtagccctcacttggtctgatgatgaacgaggtgcatactcgcaagcgctccagagtattgcaaactcgggccaaactctattttcccgaagatagggcaacgatttgtctgctgactgacgccagtgactacggggggtcaattatcctgacccaggttcgagattggagagatggagttccagttgaagaacaagcccatgaacttttgatttgccaaggtggtgtctttagaggagcacaagtgcactggtcagtcgtcgagaaggaatcctaccccgtggttcgagcgtgtatctcattggattacatcctggagagagaaggagggttcaaagctttctgtgaccattctaatttgattcagattttctcgccttcagaagacgtcaagaagcacacccggggcaagttactccggtgggcgctgcgcatttgcgatacacgactgagcatatcgacggcgaacggaacctgttggctgatatagtatcgcggtggacaccgcagggacagccaccacagcgcggaatcgttcaggtgaaggcagcacgggtgggtaatgggacgacactttcgaggctgcgaccactgcaggacgagcagttcgagtgggccaacattggagtcgatcaagaagtcgcagaccgccgcagataatccaggtccaggatttgagcaggacgggaatggtatttggactgcaggcggtaaaatatggctgccatccagtgatgagggtctcgttacgcgtgtgatgattattgctcactgtggcgtacgagcacaccgcggagcggacgctatgctacaattactcagcgttgcaagactacaacagagcataatcaagtcttcgggggctgtgtggagtagtttcagacttgaatccacaacggacgcaggatctacaacggacgcatggcgatccttgccaggagtcgccgtgctagcagtcgttctagaaaccaaccggcaggagcttcgcgaagctgcattcaatacactgtcgcttttgcattcaacagcacaaaagaccacacgtcatggcgtacacctggtcgcccactttcaggcgcttggcctcgctgccgacctcgaccaccgtgccggccgcgtcaaagccgatgccgaagggctgctcgggggtcagcactttgcccgtgaaggcctcgcctgccacctccaggaggatgtagtcgatggggttgatggcggcgctggccactgatgcgcacttgcttgggcccgagctccgggcgcttcacggacaggcgaagcttgagctcctgcgcctgcgggccgtagtggtcgtactggtacgcgcggtacgtctgcggaacgggcatcggaggattccttcttggtcgatgcttgtcgtcgacgcggcaaatcgaagactgaggctaggatcctgaagatcttgtgggatcaccttgaagtgcatggcctaagtacgatctagagctacacattgacgacacgaggcaaagcaagacactcgactactgaacgaacatccattattttcctgttgaaatggccctcttgtcgagcaatctcgtgtctagaggaccctgggatcccgcgctagtgcagtcgactgcggacggaagttcaccattgcggtaggcagcggtgccagcgccgagagctccggcgtcttggcgttgttcagcatcttcttctggcgacgacggatgcccacgatagcgacgagagccaccaccgctgcagccacgagaccaaccaacacgaccacaccagtccccacaggcgagctggttgagctctcggtcgagatctgctggctttcagaggacttggacgcggggatcggcgtcggagtcgaggccaactgttttgtaggttgagcttgatctccggtcgactgctgaatggggttgctagacgacgtcgacgtcgtggcagaaggagtgctggctccggtctttgaaggagccacggttgcattgtacgtggcagcgtcttggttctggttctgattttgttgctgctgctgctgcgtctgcgttgcgcttgaccccgaccctgtagagctgtgcaccgtgccatcgatggcgctgtatcccttctccgcaaccataataccttggttccagaggctctggaacagttcgttaaagaagacgccagctccaggaccctgcatggcgtccgacgtacggccctcgcaggtgccatcactgtctccaggaggcttggcccagatgaagtagtcgacgttgctgatcccagtgtcgctcgtgggcagaggcccgatacccgcgctcttgacattgcaccactcgttcgactcggggccgccgtggtagttgcgcgacgtgtcgaagatgcagtgcaggtcgatggagccaactgccgtctggaagttgctgcagagtgtcgacaacgtgctggtggactggtagttggacgtgttgagcgtgatgcccttcaccttggttccggcactcaccaactgcttcacaatggcagccaccgcagtggaggtggccgggtactcgagcgtccagtagcccacgtcgaggtagatttcggcgttgtcgttcttggacagcagaccgatggcagtttgcaggttggccaggtacccagcgccctggccacagcccgtggtgtctgctagcagtccgatggcatcgggctcgagaatgtacagcaccttgcggttaccgatagccgacgtgagtgtggtgaggaacttctcgtagtccgaggcggagtgcaccgtactgcccaccgccgactccttcgcagcgcagtccttgttcggcaggccgtagaccacaacgctgatgcgcgagtcctcggagcagcttgacaccaggtcggccgctgtcttcgcgtagtctccgttctccgtgcggtcggagtaccaggttgccatgccgaacttctcgagcgcctcgatggcggaggccgaggccgggtaggcggttttggccttggcgtaggtcaccggcggcaaggagcacaaggtgtcggcctgagcaaggctggccgtaccagcgacggccagcaggaacgaggccgctactgcagaacggaaggagcgcagcatgctctcagcgttctgacaaatgctacgttgagtttgctgtgtcgtcgaaccaaatttcgcgagtccggcttgtcatctggggactctgcgaggctgggcaaaagcagcaaagggcacaaagaggatcaagaaccgcagtggaagaacgcttccacaccatcgcgccgacgatcctggccaatccacgggggccggacaatgacccgggcctcgctgtgtctccagctgggcccagcagcgagtggtcttcgccatttcgaacggaacgacaggacgcgcttgccttcaatgcggtggcgttggtgctgccacctcaatcattctcgcttttggccgcgcggcctaaacgagttcacttcacgttttcacccactcaataatgtgtagtggtccgacccggaaggaagtgaccaaggacatttcattgaggtctcgtctcgccgcaccacgctccatggagagcccagcccggattcggtgcttgatgtgaagccaggaagtcagtcacagtgcagcaccatgcaacgacaacggaactcatgacacaagagcggaaagtaagaacatgcattggagtgctgtctaacctcgcgggccgccctaatccaatgcgtcgattcaaaactctcctctcgaatcggagggagaaactactacttgagagagaagctagccttatccactggggctaggaaagacgaacaaacctcatacacagagagagactgaggcataaccggcgccttacaggatcgtgctgccgcccgcgggcgtgcgcttgatctcaatgtggatgttgttgtcgttgtcgccaggggtcgacagagcggcgtcggcctcgcgggacttcttgatgtgcgaggcagcgacaccgaccgcggccacggccacaacggcggccacggcgatcacgccgaccgaggtagagaggccgccgccggtgttgctgtcgcccgacttggtgttggcctgctgggcggtctggtcaatgttgtcgctgcccgaggactgcttggtcgaggaggactcgcccttggacgaagagctctcgacgtccgtcgacgtagtgggagcgggggtgggagcaggggcctccgtcgccttcgaggcggagttagtcttcgaagcagagccctcctcatccgtaggggtggtagcagcgggggtgatggcaggggtctcctgcgacatcgaggccgagctctccttcgaagcggaggtttccacgtcggtcgacgtggtagcagccggagtcgcttcgggcgtcgaagtggtggcggcgggtgcgttcgtctcctccgaggggaagttggggttgcagtcagatgtgtggtcgccctgctcgacggtgggggtcgtggcagccggtgtcgagacaggagcctcggtgaccgggaccgaaggggtgtacgacgagctagagccctcctcagcggtaggcgtggtcggggccggcgttaccacggggcccttggtggccgacggggtgtacgtcgagcccgagccctcctcggccgtaggcgtggtcggagcgggcgtcacctcctgctcaatctcaggcgtggtcggggccggcgtctcgtgcgagccctcctcagcggtaggcgtcgtgggggcaggcgtcaccacggggcccttagtggccgtaggcgtgtacgtcgagctcgagccctcctcggccgtaggcgtggttggagcgggcgtcacctcctgctcgatctcaggcgtggtcggggccggcgtcacgacggggcccttagtggcagggatcgagtcgtgcgagccctcctcggccgtggggttcgtcgcggcgggggtggccgcaggcgcctgcgtgaccacggggcccttggtcgccgtcgtggtggtgtacgagtcgtcctgctggccgcccgtggccggcgtgaaggagccgccctgcttcagggccagcgcttcgttggagagtacggccaccagcacggccgtgcagactgcgagcttgcggaacatctttgctgtcggggtctttttcgagtctgccgccggagccggagcaggaggagcccgcagctccgatcagctccccagcgtggcctgtaggggtgggttgggtagaagtgcgagtctctcttggcgcactatggaccttctttcgaggggctcggccgccacaacgccacgaccgtcgctgttcgtaattgacatgtggtcgacctcaacaacatcccgagctctgcacggcgtgcagtgcacgctgcagcaagcgaggctcgctcgggtggaactggcgccaacgccagcgttacgacgaccgtgctgggtgcgcacgtgcgctcgccggtggcactgacaagcgagggaccttcctcccggcgtcctacaggctgcagcacgactgcgttgtgcgttgtcctgcgctgctcgcccagcgtaacacagcgcgggacgttttctcgctccggacccaccgcgatgccctggctcgctcgggcatttcgcaggcaaaaaactggcgtgcccgcggcaaatctctgtctggacgagctcgcgatggtcaaatctgcggtgaagcaaatgtagccattccaccgagagcattctgctgagcaggtcaccatgacagtcacgtgtgttgtgtgagctttacctgtactgacacagttctcgacgcagttgaggcattggtacagtacatgtaaatgctgccaccaatgttgtaggtactgtagaatatagtgtaactttcggaaaagtaagacaatcgaatggtaaagttgctaggtacttaccggtacgtggatacgtagataccttttttacagtccagcagtaaaggctgtcttatcgcagctctggtgtcttctcacgacgcgtttacatgcccataagcatgatcgtggtgagcacaaccatggtggtaaaccagggtgatgcaggtgcagtgttgccagacgactcggcgtctgggtcgtagatggtagccatctgctgctggttgacaaagtagccctggttccagagcttgatgaagtggtcattaaagaactctccagccggcgggccctgcatggcgtccgctgactggtcaacgcaggtgccatcgctgtcacctggaggcttcacgtacacgaggtagtcaatgttgtccaagtccgtaacattcgtgggtggcgccccgatgccagctttccgcacgttgcaccattcggtacttgacgcgttcgcaaactcttggaagttgcgggatgtgtcgatgacgcagtgaatgtcggtggaccccactgcagtctggaaattcgtacacaactcggcgatctgcgtggtggagcggtagttggacgtgttgagcgcaatgcccttgacgcggccggcctgcgtgagttccttgacaatctgagccacgatatccgccgtatccgatctctccagggtccagaagccaacgtccagatagatttcagcgttcgggttttccgacagccgcgcgatcgccatggtcaggttgctctgatacccgtactccaccgcgcagcctttgttggcgaggagacccacagcgtccggctccaacacgtagaggaccttgcggtctccgacaatcgctgtcagattagtgatgaactcttcgtagcccgctcccgtcttcaccgtgccgttgccattggagtacccagcgtcgcagtccttgttggggagtccgtataccaccacgctcagcctcgacgactccgggcacgaggcaacgaggttcaacgcagtctgcgtcgcgttgccattgacgtcgcggtccgagtaccaggtcgcaatgcccatgctctcaagctgatcaagcgcgaaggcagagtccgggtgtgctagcttggcggctgcgtacgtcacgggaggcagtgagcacagcgtatccgccgcgcgggctacaccgccgagcaagcccagcacgatcaggaaaagcgggagcagcggtgtcatgtgggctcgttggtcctcgacgcttctgcttcagtactgggcgctgtccaattgagacggagttggtgatgacggcgaaagcatcgaggccgttcaaggcctgggcgctgacaccctctatgaaacgtgattgatgtgtagccatgtcccgagcttgtcaactcgtcaaaaccgatctttttgctgctcgagatgctcaaagctgaagctgaaggtttcagaacacatcacggcgtccacagcgacgagttactcgaagcgtcgctgcttcattgatgaaggcggctggtggctctgtcaaggttgcagccacagcgcctactttcagacaagggcctgagtgcgcgaggtgtcgttggggttcgcggcggcaggattcgtagctcagccgcgctgtatccgccactttatcactgcactgcccgaaggacaggtccggtcatctctgttgaggaatacacgttatcgcacgctgtagtggctcgacctatggtagctctgccgttggtgagacgactgtgccagcatagtgcacgagcagcttggctacgatttttgacatcatttctaccgtaaaaatacatcgtagtcgtcaatctttgccatgttagctcgtgcaaaacctcctaagaaggcctaagtttgcttaatccttcttgatctcgtgctccatgctgaaagtttggaaacgctgcagacccgattcatcgttttggagccaaatgtttgttttgtaggttgattttcccgatacgacttaggggctattcaactttgaattgcctgaatagcttcggttcatttcttcgatgccagcttgacgtggtcctgaaacactctaaaaaaactatgcaagtagtaaatgtacatgtagttgcatcacgattccgttcgcatagcttagagctgccgcgctgcagtgctctaaccgctgcttacccgctcacgcacattctggcgcatccgttacctggatagggccttgaaaacttcgttgaccgtctccagtgttcaccagaatgagtccgcgacatccgtccgcgactgtgcgttgcacagtatttcgcagcaggttcagtcgcaccactatgattcatttctagcccccgcttgcagcgcaggtgcagcggtccgctgcaccagcacgatcgaaaactcgccagcacggcccaatagatgcgatagggaaacagggggatgctggcagcttccatagaactacacggcacagctcagctaggcaagacttctgccggactacgagataagatacaacagctaggtgatcattgtgctgtcggttggataggactagatgctgtggtgatgtggacgctgcaagttctcagcccgctgaagagcgaagaagataagaagtgccacgccggtcgatgttgaagcttcaatcgtatatttgtgtggaccacatcgccacattatcttcaactagcgttgtgcatgaacttgtcaagcccaccgaagtgcgatgctcggcgcgctgcggcgagcggcccctgtccgcggctggttcttctcgggtagctgtggggcggctgcattcgccctggcgccagtgaccgtttgccgcgcgcagccgagggatggcacccaacctagtgcaattacagctatctgcgaccgtttgccgggcgcagccgatgcctgcgggcctcgtctcctccttctccagcaacactcagacgctatgtggattttatggccttgggctccgtgaaggaagcactgcctaattgattgcagcagagtagcattgccgttcttaccgacgacttacgctctttgcgcctttgtcttcgtcactgcactgcagaaagaaagtaagcaggagacggattggcctctgcagcggcaagtcctcgtcttcctggcgatggcgctatgctgcgtaattagcgcgctacgcgccgcgaggggtggtacggccgtcaaacgagccgagccgcgccgcttcgccggacgaccggcgcgcgatctgcagccatgttgccgcgactactataacggacaataacgccttcaaaacaattcccaccaaaaaattgcgcccgcagagaaacgagctccgcgactgatggctcggtcctcgcgcgatctcgacgccctcttgtcgaatgttccgctgtcttccttatccgccgccgtgaccatcagctgccagacgctctccgagaacgctccggcgcgctggccgtcgcgcaatgcttggagagcccgtggaggctgcggccagctgggcgccatttgacaccggagcggagcccaagcagcggtgctgcgtgtcagtgctggccagccgatggacagcgacagcagtcgaacgatagagctaatctaaagtcaccagcgttgacacgctgcgtcgacgtctgccaacgtgccagcacggcctctgccgatactgcagccacacgccgccgccgtctggctcgcgttgatttcagtccgtgagagagcttgcagttcccccgccgccgccgccgccaccgccacctgctttttcaggcaaagcctagcgagaattttgcactcctgcgctttgctctgatttggcctgcaagaaaccgctcgacagccgttttatgccattttgtacaatatttctcgacttttgctgctgcgcctccgctctgctcactatccaactcgccgcgcagcgcacactcggatcgcctcgtcatttttcagcacgcgaacctccacgacttgatgcccggccagttcgttgacgtggtcgccgtcgccgtcgcgtcccccacgacgcttgcgcccagcctcaaacacctggacgagccgctggccgtgcccgtgcccgtcgccgtgcgcgagtcccgctcgcagtcgctgtccactctgccgcgccgcgcctccacggccagtgtgctcacggtagacaacaaccagtccgacaccttcacggaggaggagctggagttccagcggcaacagcgcgtccgacactcgcgccgcgcactcagctcgggcaccggcggctcgctcagtctgctgcagcaggaactcggctacccgcggcgcgcgcgagtcacggcagacgcacaccgacaccgacgtggctccctattggaaacagccctggagaactcaatggccaagaagagagtacacagcaacagccacgacagccgcgagctgcaccgcagtagcagcgggaactcagatagcgtgagcagccccagcgacctcctgagaacgcggtcggtgcccgagcccgaagcggagagtcagatccagcagcttcactaccatggccgcagctggacgttcaactcggccacatgctcaccacggagtgatgctgccggcttggtatcagaagacaagcgcgcgcaggatgaggacgaggaggaagaaaactttatgaactaccgcagcgcttccgtcacgggttacagtcgcgacaccgacggcgtcgtctactacgaggtgatcgtgcgctctactgctcacggccccttgtcggcatacaaggtgagacggcgctactccgagtttagggacttgcacgctgcattgagcaaggtcatgccggtatctcacagaaggctggcatctgtcacggccatgaccagtattagtgacgacaacagcaacaacaacgaggaggaggactcgcgcttctccgtgtcagagcacagtggaaccagcgagccgactctaccgcctctacctgataagggcggtgtgtggagctaccttcagttcgacagcattcctctactcgagcgccgatcgaagtacttcaacgccatgctggtggctgcacaacgacaccctgcggcccgagcaagtcggctgctgaatgacttcgtcggtactccgcctgacctcgtgtccctgcactcgagcgttgagaacagctacgtgagcctgaaccggtttgcggcccccaagctgagcttcgacatcgagatccaggagaggaaggagaaagccaagagcatccggcgtcgccgcagctccatcaagaaccagagcttcaccggatcgatcgacgccagcttcaacagcccgcgctcctcgcagtagaggggaccaaccactccgctccgccgacaggcgagatgttcaccttgcagacacacacaacacaacacatcatcaccgcgcagcacctcggagccgttttggatttttatctcaagtctgccgctgccgttgcggcagatctgttcctactcgtatttcttattcgttcctactagtcctgtagattgtcaacaaaaaatataacgagcgtctgacgtggatatgcgtcttggttcgtctgcctccgcgacatgggagcgttacgacactagcattgcattgcaggaaggtcggcaatgggtaacgctgcatactgcggatctgcaaacacgaacaagtgcttcctcatcgcattcaacggcatttttcgtgactgaagcgctcctcggaatcggttcggctctgtatttggtggtctattaatcaagaagcgagggtgtcgatgtcgctgaccaaagctgcgctcgccttgcctcggctcgccaggaaaggcccagcgcccgccgtacgtactctacctctccaaacggctgtctacagggatatccatcaaggtgaagagtcgaactaaacagagcagagcgttgtgctaagctacggagacggatacgcgcgcgcatcttacggcggcaccatcttctggacgtagtcggtgacctcggggtcgaggtactccgacagttcgtcccgggtcacccacaggtagtcgctagccttgtcctggttcagttccacgtctccgtacagcagctgcgacttgtagaagaacactttggtgccgtcatactcggagtcgttctcgtgcaggtactggaggtagcccatgggggcgaaacccacgggcgtggcatccacctcgtcgcccacggtttcagtcacgtgtcggagcgcagcgtcgcgcatcttctcggcgtcctgcttctcgcccagcgggaagaaccacgggtacttggcgtcctggtccttgctcttgaccagcaggaacacgcggcccttgagcgcgcggttgagcgacttgcggttgttagcagcgtcatcctccgtctcgcgcggggccaggtggaagccggcgcccacgatctcctccgggtcctcctcagcgttgggccacggcgcctcttcgggcgtgatgtgcctggtgccgggctccatgaaccagaagtcgtcctctaatctctggtcctcgcgcagggccttctcgtgctgcatgacctcgaagtccatctcccagtccttcaggtcgggctgcacaacgggcaggcgctccaacacgccggcgctgagcacgcgccacttcttgccatcgtccacgggcggcgacacgaggaagttctggcgctgggcgcgctggcgcggctgctggcgcggcggcggcgggttgcgcttgcgctcctcgatcttggccttctggcgccacgtcaggcgcttcttctggccggaagcgaacgtgcgcagctgctgcgaaggctgcgcgccggccgcagcgcgcgtcaggccgccacggagcgcgaacatgggcggggaatgcgaaggttagtgccgcgagagctgctgggcgtgtgtggctcaggccaacgcttgccaaaaaagcgggctactatttgagtcaaatactggtaaataccggttctaatcaatgtgcaccacgtcaaattgtacctgaaaacctgcgacgtgtgcgaaaatggatttggctacagcggtggtgggagcaacttagatctccttgttgaagagcgggtggttgtagcggccggggaccttggcaccagcttctgatgacttcgccccgttggcagctacgatgttgcgtcgcgcgtcggagcctgcagaccgagctacggccggtgcattgcggcggtcctgcatgcccttcgtccaggagtcaacctccactcggtcctcttcattaaatagcagacgatgacgcgtgcctagcgccagcactccctcgacaatagtagtcgcccacgccacattgagtttgctgtacagcgtacggagcagaggcaagagctccgtatgcaggcgtttagcgcgctcttcctcgtcctgttcctcttcgttgctgaccattgcctcgaatctggccttcaccaccttagcggccttgttgaactggtacgtctcgtccgtaaagagctgtgcgtgcgtgacagccaggaacttccacgcatccagcttctgctcccgcagacgccgttcatcaccgtcaacgctcaaaatcacttcgcgcttggaatccaacgtctcaaaaagagtctggaaccctttcttgccgctcagcgtccccgccttcgcgttaatcaccttcgctagcgtgttcatgaagagctcacttgactcgaccgtcaactgactcgagatcaactggctaaacaatgcactggccttggcaaacttcttgtcgacaagctgcatagagcaattgcaacaacaaatgtcaacgcctacatatcatcatggcagcaactttgtcgattgttgcgctcgtaccatgtatccctcgagcttggcgaccgtggccggcaggtccagcggcttcttctccacacgttggcgcttcgccgcatcgtcctttgccgttggctcgtccttctgctctgtattccgcttctcctcctctcgctcgcgcttggtcttcttgggcagcgccaagccgccgtacaagtcgtcgccgtccatcgtcttattgctcacttggcttcagtatagaacagtcaaaaccttactcgcagaatacaatatgccctgtcatggtgcttcagctttgcctacgcgtaagtcgctcacaacttcatcaccttcaccttcgtcggaggtatcctccgcctgttgttgtctccgggaccatgaagcccatcgacgcaacgacccacgagtacgcgcgcatcaacgtgggcgtgtcggcccccgggcgcatgcagatccacccgctggcgctggccatgggcgtcgtcggcctcttctgcctgctcttcctcgtggccgcgtcctcgtaccagaagcagcagctgcaggtcatggcccgcaagctgctgcgcaagaagcgcaagtccgtcacggaggaggaccgagtgggcgccggcggcgtgcacccggtctccgacctgccgggcttcgcgcgccaagcggccgagtcgggcaacgcgcgcgtcgtcaagcgctgggtccactccacggacaggaacgtggacgcccgcagcgccgagaacctcacggcgctgcactacgccgttcgcggcggccacaacgagtgcacgaggctgctgctgacggccaacgctgacccgaacgccatcgacgaacgcagcatcacgccgctgcacttggcggcgctgggcggccacgcgctctgcgtgaagctgctgctggaccaccacgccgatccgttccgagaagacgtggaccaccacacgccgctgatcatcgcggagcagagcggcaacattggatgcgcgcgcttgctgcagcgagcgatggccaaggccgcggtgcaagacgacgcgtccgtcacgctgcgagcaggcgccagcaccgcgcgggtcgacaatgcagtgtaaagcgctttttggtggctcattgtcgagtcttagtcagcaaaaatacacgtctcaaaagcttctagccccccctgtatatcgaggcgttctatagtttggagtcgcggcgaacctcgaacatagcggccagagcggccacgagcaggtctacctcgcgtcgcgtgttgtccgcgtgaatgacgatgcggaagcgctctgcacccttcggcaccgtcggggagcggatggggatcacgcgaatacccatggcgttcatctgctgggacgccatcagcacgcggtggttgccttcgaacacgaccccctggatgggcgagtcgctggccagtagcgcgtcgcgcgggatactcgagttgccgttcaccttctccttgaaatacttcacgagcttaatcacttcgcagcgcagtgcgttggctgcggcactagcgctgaactcgtgcacgcaggcgacagacacgagctggtcgaacggaaacgctgtggtgtagatgaaggaccgcgcgtagttgaccaggtagtcgatcagcacctgagagccgcacacgacagcaccgtgacaccccatcgccttgccgaaagtgtgcacgcggcatgcaaacgcgttcttgtacttgatctccagaccaagctcccgcacggtgccggagccttgaggtccgtagacgccggtgctgtgcgcctcgtcgacgatcaggaacgcgccaacccgctcgcagagcgcagccatggcttccagaggagcaaagtcgccgtccatcgagtagagcgactccaccaccacgtacgcacaagtcttgctcgcgtcctgttcagatgaaggcgacagatactttcggagcttgtgctcgaggtcttcgaggtcgttgtggcggaacgacagagcacgacccttagcatacgcgcggctcagtcgaatgccttcatggcacgagttgtgcaccagctcatcgtacaggatcacgtcctctgcttgcggaacgcaggacatgacgcccatgttggcagcgtagcccgagttgaacagcagcgccgcgtcactgtagcataaattgaagggtgagtcactcgctcagcgcactactccaccacgaccccaccctacctgttgtagaacgcggcgaggttcttctccacctccatgaacagccgcgagttgcctgagatgaggcgcgagcccgtggcgcccagcatgggcgcgtgctgcctctgtagctctgtgtgccgtgtcttgacgagctgccgcagcggctgcgagcgcgcgaagcccaggtagtcgttggagtagaagtccacagcggcggtagcgctctcgtccggcacctgcagcgtgcgcagcgtccccacgtggcggcggcgcgccagcgccatgccgagcttctcgtccatccgcgtcattgacacaaagtgcaagttgtcaaatggtgggaatgatgatgtacagtagaccagggccttctattcggagtagacatgtgggccacacaacctgataacacaaacttcaacttctgttggcgaacttcctgtgtcggttgatctggagctactgcgaagccttgtgggttctgttgcttgggggactaagagcctatcttgcagctggcaactcgtttagtgaggaaacacttaaatgccagagatgagttacatcggaatgcaatttttgttaaatcaaacgtgtttttcagagtcccagcattctacatccgatttttgacgacgtctccaaactgtggagtccacagtgtcttgttgccgccttgccttcttccacggcattgctggtcgatagctacttagttgcctccgaattgcacaaccatctctcggaacgagaagtaggagaggtacagcacgcgtcggatatacgccgggatgtacagcgtcgcccgatgtaaggttccctcccagtcgatcccaaaaatgtatgcgatagcggcgtacgtgatcgttttcccgtctccagccttgcaggtcgctgacagatcaatcggcacatttcttcgaaaactgtccacgaacgcttttagcggtgtcgcgaactgcttcaagcgctccccgttgtgctccccatcagcgagggcctccggttgatctggcggctcgtacgcaacgagttcatcgtacgagtggcaagttctaaaggcatgaagaagtgatcgtgggtggccgaaaactatttggtagaggtaatgagcacttttggccgcttgaccgtcatcaagcttgcagtgcgcctggatagtctccgttttgttatcgtcccaatgcgtattctcgataacttcctcgattacagacggctgcattaaatccaagctcagtcgtcgaaactctagccgatcaccactcgacccctctggtacgaagctcaggaaaggcgcccagccagcaaccaagaaaaacagcttctcaatcgaaaataaaggcatcaaaatatcgtggcagaactcaatggaccggtccttcttctcgatgtcaacaaggtcgacttcaaatgccttgccaatctcgatcacgatgaacaatggaccaacctcgatcgtcagattctccaatacagtaaaaatactcgggtcatcgttcagtgagttggggtctagagcacaaggcatcccgcaatcgtacttcgtgcagccactagtgaagtactcttcgagttttccgataaaaatcttcgaggcctttcgaccgtcaaacttaagtcgtcattcaggagatccatcccgaaaaactcgatagtaatcgtgtgacactgacgtacagtatccataaagctgctctgcataatggaggcatccgcgaacctatccattctctgtcggcatgtccgaataaactcttggctgaacgtagacttgcctaggccggggatatggtctatcagagggatcaccacgttgccttcgcccctttttgcgcaattgtagttgccgtggtaggattcgagaagctctagcgtcggacgatcttggctcatgaaaaacagtttgcctccctcgacagaatagactggctcctcctcttcgtctttccattgccacttgctgctagaagcgctcgcttttctacgtttcgctggagcctcatcaacttcatctttcggctcctcccgagatctcgtccgtaccgtcgtcacaggaaccgtcacgatgaccgtagtctcctttgtttgcccaagcgactttaaacgtgactcgacagccaaaggctcacttgaattatatgccgtctggtccttaaaaagcacgagttgacttggcaccctaccggggagaatggcttgacatgcagcaaacactgcattccgcatatccttcactgtgttgtcctcggtcagtgagactgagtccacgctggtgcctgcgaacggcgtgttgttgccggcttccattagcttataccagacctcgggctcttccacgaggagcgggttatcttcattcactccgtagagatccaaactttcgccgatttccagaggtgtcttcgcgtcgcagctcgcgaaaactttcagggctgaggcgcgaatttcacgtggaagagaacgctcatattccttgtacactcccttctgaaagtctccaacgtcagcaccatcaggaatggtcaacacttccaccacagtctgatgtctacagctcgatgcccctttgccccaccggaaatacttcttctgtgccatcgtccacctctccacaacgccgcaagttcgagaatgacagcggaattgctctgttgtaccgcgtatgaatgatgggttgtggtcatgctcagcttacatctctttagcgcttaagagtgatggtcgtaacttcaactttccggtggtcgtacgtgtgaaagggcttgaagacgcggaaggggagacacccataaagaccagatcaccccgttggcccacgttggcgattcccatcagtatctcattccccacaatgagcgcggcgcaaaccatgataaccctggccaggagcgctcgagaaacggagcgtgtggagcgcgatcgcttggagcgggagccgtcctttgtgtctgcgcgttcgccttcatcggctgtcgatgcgtctccgtcgcctccggacgccgatggctcgtgctggtcttctgagaccgcattggatggccgcgtgtttcgccgactgcagcgcttccacctcctgccttcggagctcaaggcgcaatccgacatggtggccacgtacctactggcgccgagagtgcgtcgaaaggtgctcgagcagcggaagcattggtggcagcacccgctgcacctgtcgaaggctggtctgggcacctttgtgcagggccgcgagcttttgaaagccatcttgggctacctcttgctgtcccacgcggccaacaactcgctccgcgatgcgcagcaactcgctgaagggctcgtgctcagtggcttcttgtcaccggtgcacgaggcgcgagaagctgatgacgagcctctgggcgagctgtacgtgtcggatgacgagtactacgagctcgtcgctcccggagccaccgcgattgtcccgacgtccaacgtggtggcctcggccactgtggacaatggttccgccagttcgttgccaggagccatcgtctcgcccgttggaccgcagcactctcctgtaaatcccccgaagccggcgcgacaaactcgaaccgcgctctctgtctgggcggtgacggacggcgcgactcgagcgggtttcgtgcagcgtcgatcggggcgaaagcacatgcgggacttactcggaatccagcccaaatcgaagagctgctacgcagttgtgaacaagaccaagcaccattcgctcgtactgttcgagacggacgtggcaagacacgaacttgtgcgcgtggggctccctgcggcgaccgtggagtacatggcagctgacgacaatccttcgtgctttcgcttgaagatttgcgttgctagcggccgtcgtgatggcggcgacgacgcggtcgagattctcagcttaaagagcaagcccgagcaggagcagtggctgcttgcgctgctggatgctggcgcagcgttcctggagacccacccggcgattctgtcattcgcatcctcaacggcctcgctgtactcactgcgcgatacggacgcgaacggcaaacccttctgtctgtcagagctgcgtggtcacgtggcattgctggtgaatgtgaccagcggctcctgcaacaccaacgccgagcagcttctggagctcgcggacctgtcgaagaagtacgaagacgctggcctgaaggtggtggcgttcccaagcgctcagttcggcgacgctgaattcgacaacgacgaggagctggtggagcacttccaggagctgtttggagtccgcttcccggtgctgaccacgcgcgacgtgaacggcccgaacgcgcgcgatgcgctgctcttctgcaagacgcgagtgccgggagctgccagatccgcagcgaacgcattcatcgaaaacaacttcgtcaagttcctcgtggatcgcgaaggtcggctggtcaagcggttcggccccaatgacttgcctctgagcatggaaactgacatccaagagctgctgtaggtagttgtcacctcctacgccggggaccacgaagacggcctcgtgatctcccgagacgccattttgctccataaagcgaattgaatgaagtgtttgttgctggagatgtggggtggaagatgcaataacatgttatttaataacccgcgcattcgcttctcatacgcgctgcgctgctgtccaggatgcgaacgctagctggctcgggctgctccatgcgttgacggagccatttccaggggaagatcatctggccgctgcaaaactgcactcgagcctcgccgccgaacgaaaggtgtgccgtccaaaaaatctataggcgctgggcgttccgttccgcgcgtcggaggtggcgatgcagcgctgcatcatggacttgaaaggctcggaagacttctaagcaacaatctagtcgaggaaggccttcttgtaggccgagttgagctgctccacaacgagaagcacgatcatagcgttgggcgcgcagcgcgtgtagtaggtccagtagccgcgccaaagcttggaggggccctccttggtcacgatttgcttgaagcagtcagtcacgcccgagtacgggttcttgcccgtgaccgggtccaccttcatgttcataagtcgcgacttgacaaggtcgaagggcagcgaagtgaaggcacaggcgaagcccgacacggcgctggcgcccatgttggtggcgaagccgtggccgtactgggccgcgatcatctccttggcctggtcgtacgaggccatcatgccgaggttcatggcggcgccgcgggccacgagcgggatgctgccgcgccagagcgtggtgacgccctccgagccggcgatcttaaagatggcgtcgaacacgttcttgtagccgcgcttctcgccggccttggccagtgtgtcggcctgcatgcgcacgagggccacgtccatggggcagccgagcgtggcggcgatgccgcccgtgacgatggccgacgccgacttgacggccaggggcagcgacgcgctctcgccgttggcgacgcggcgcgcgatcatcttgtcggagaaggcgcggtgcatgccgaggcgggccgtgccgtagaccatctgacgcgccacggcggccgagaggcccgcgtacaggccggagatgccctccttggccacgacggagcgggccacgcccaggcccgtgacgttggagcccgtctggccggccagctgcaggtgcaccttgaccaggtcgatggggtggatggccacggcggcgaacacggccgccgagccgccgcagatgtacggctgcgcggccagcgcgatgggggacttggtcgtcgtcgacatggcggtggcgtttgctgagctgctcgaggaggtttcgggaatggagtggtcggcgtcagcaccggcggtggatcagggccaaagtaccgtgccctctgctggattgagtaggcctagggctcgttgaaacacatggctcaccaccaagcagaattgagcccgcgcgactcgtttcgatcggaaaatacgggagatgtggtgcacgaggacaaagtctggtacgactgaatactaaacgaataaagcggagccgagtgcgtcagcagggcatcggtagacgcaggtattgaacacctaggacaggatgtcgaggcatttgctcaaacttaccccagcgctagtgcttgccgctagccttgcgggctgttccgctcggcttgaaagtgtacttgcacgcgcgatttgcgcggcgccatcgtgttgtaagagctgccgttcgtggcgtggctctttgcctcccacggcgcatgtgaacctccgctctttgctgccaccaaaaatccgagcaccgccgccagcgacaacaacaacaacccgcaaccaagcagcggagcattccgacgggatggggaagctggcagcgcgccagcgattcgtggcgctcgatgttgtcgagcggtggtgcttggggcgccgcagcaaaaacgtgccctacccggcggttctttagcgacctgcttgcttgattgggaggcgcagcgacaggctgcgtgggccgcaggatgattgctatggcctcggccagcgccaagaatcttggcgcttggcaagatcgccggcgccggattgggaggacgctgcgacacagcaggttggtccttcggctgcagctggggacgtttgtgagtcgccaccgtccgcgattgcacactgcagccgtccaacatcggcgtgcttgatggtccccaacgccggccagcacggactctcgcgcgcacgtcgtctcgctcagctagacgccgtcgctgtggtcctgcagtgaaattgccgaatgcgcaagtggcattgaagtttgcgcggccaccagaaccttccgcttgaagtcgtcgcgccacaagcttttcctgcacttgtggatgctttgtgtgaggtttcattagcgcaatgtcggtctacttactccggcatgcatcatgcctagcaacgcagtgagcggagttcggcaagagagcaggttctaaatttagaccgctataaatagagctccagaaaattaaaattgaaaacagaaactgctaaatactttttgtaccgtaccagatcaaagctctagtacagattgaagctacatctccgcccaatcacattatttaatcttttcagccaatatgcaccaatctacactgcgttcctctctgctattggccacatctacagaacgtcagtttcgctataagtaacttggcacagtgaccatgccggcgccgctagcggcgctgctgctgttgctgctgctggcttcgacgccgccccgcgcgccggccatcgacgtgcccgtggagacaggcttccagttcaccggcctgcattccgacttcgcgcagcagtactacgtgctgtacacagagctggacgacactgcgcagctcacggacgtgagcgcggacgcgctacccagcgaactgcggacggagctgagcgccaactcgctcacctggagcgacatgcccggcctgctgcagcgcgccttcctctgggacgcgggctacgtgctgacgcccacgcactcgctggccaaggtctacacgcgctgcggccgcaccatggcggaggtcgtggtgccgcccaaggccttcgaacgcgccggctgccaggtgcgggagtgcgtgctgccggacgggacgcgcttccaccggtcgctcaactgcaaggcctcgcagctctccagggccgtgcaatgcgcagtggacgccgctgacgacaactcagcgccagcgtacgctgctgtctggggggacggaggagaggacgacacgctgccggaagtgacggtgcagcgtcacgcctacctgagtgacgccgataacgcccccaatttaatgtttgcgctgcatacgacggcctacgaggtgggctacacgcagtgcccgcttacgccgtcgatggtgatcccctgtgcgccgtacaacttggtgaatcagtcgagattctgcacgccggagcctggcgacgtcgcctcggcgtggcttaccaagtacgcggcagaccacaagcaggacaagacgtggctgctggtgccgctgtgcatcgtcgtcttcgtcacgtttggcactgtcgcagtctaccgctacaagtcggcgctgcgggacgaagcgcgcagagaaatcgatttgttcatgcgcgagaatcgtcatttgtttgataatggagctgtggaagcgttcttggtgccgaagaggaagggcaaatgcgctcgctcgaccaggacaagtcgccagcaccggtcgtcgtcgtattcgtcttcgtccagcatcgacagcgacgacagcgcgtacagctctcactcatccgccgaccttgacggttcccaagtgtccttgagttatgatgaaggaaaccagaatgcagcagcattcgagcacttcgacgccacaattggattgtcggcgtctgcgtttgacccactggcgtccaacgctcgcatgaacccgctgcaaaacggtgctgaacagggcctggagaatggagacacgacacccgatgaggccactgcgcgaaggaacgagatggctatccagagcttccgactatttgaatcgcatcgcaagatccgtcggctgcgtattccaattggtgagctgcagctactgcgaccgctgtcgcgtggcgctactggtgaggtatggcttgcgctccataacaattcgcaggtcgcgatcaagcagttggtgtcggagaaacgccgcttgttgcccgagatggagatgttcttggccgagatctacctcatggcacagttgaagcacccacacatcgtgacgctgatcggtattgcttggaacacgcttgagcacgtcataatggtgcaggagtacatggagggcggtgacttgcagcactttctggctcagcagtgctccaacaacaacacttcggcggccccaataagctcaggtaacacgatcggaaggcgctccagctccatgtccggaggcttgccccaggttgacgaagctgcagctattgcggccacatcatccggttctttcgccggtggactgggtgccgctgctaatggattgatccactcgacgcattccttgcactcgagccactttacttggtcgaagcaaaagcttgccatcgcgcaggctgtcacgagcgcattggcgtatttgcacgcgctgacaccgaaggtgctgcatcgagatgtcaagtcacgtaacgtgctgctgtcgtcgtctctggatgccaagttgtgtgattttggggtcagccgacgcaagtgcagcggcaacgacgatgaaaccaacctcactgcgacagctgcagctggcacattatcctggaccgcgcccgaattgctactgggcgaggagtacacggagaaggtagatatctactcgcttggtgtcctcctcagcgagctcgacacgtgcacactgccgtaccacgacccagcctctctctcggagcgacttgtccagcaccctcttcgcctgatgcgacgcattctcgacgacggactgcgtccccagctctcgccggactgtccgctgccgatcacgcatttaatcgcggcatgcgtatcgcgcaacccgaagctgcgcccgagtgctgccgatgtgggtgcttggctcgctagtgcacgaggcgagcggttgctacggaagagctcgagcgttttaatctcttgagtacttctctggcccacataagaaacaacacttcggttttctggacataactttttacaaaaaaatcgtttggtgactcgcaatacctcaaccgaaagctgcgcatttgctccgtttcacgctatgatttaaaaaatctagcagcagaaagaaaagagaaacagccttttatctgaactccgttttaggcaacattaggtatttaagcgaggtgccgtcaaaaattagcgatattagaaaataaaatatcaccgtaatcgcgagtgactgctttaccctgatgttcggttgtcgatgttgtagcgcctgttggagacgagttagaagagctaaagttttgaggtttttctacgcgattatctcgacatgcgcagacccatttattttggccaatagtaagatgaaacagttgattatacccaatcatatgtgacatgtggttcacattaaattgaggtttaatgccgaatgttgtttcttaagtgggccagagaagtacagtacttaggtgtagcgtagtgtgtggtgagctaatagttaacatgcccttagactttctgttggaggtgattcaatcgctctacaggcaagtgagcaacgtccacgcgtagatgccctatgttgttcaagaaagtgccaacttggctttccattttcgactccccgatagctgtaggcgctcagaatgctgcagcgcaaggcagaccaggcatcgtttgtcaccatgacagtgccaacgaccggcgttcgggtctcctctgagctcacgccgctccctgcattctttccgcgcatcgatgcatctctgaagctactggtaagtacagcagcgtcaaggagtcgtcgatgtcaagccggtcaagctggttgcggcgggttttcagcgcgttggcaacgctgggccgctccgcaaccttcgaagcgccgtcggctatatcggacctcttgctgcgcctctgagtcactttccgtggaagcgcgctgaaagcggtcggcgctgagccccctccggctcggacgagtcactcgagccagagcactcgtcgccgagtgcttctcatcgagcggagctgtagcatgtcctctgaccaccgaaaaagaagcgctcgttgaagatgtgaacacggaagcccctttgttgacaacagtgggcgggctcggttcgtcacgaagcgagtcgcacttggtatggcttactgccgcagcgttggcgcgcttcgcgacggccctgctgttgctgctgctgctgctgtgggtgcagacgacatgcctgccgagtaagcagtgcctgtcccgaccacgctgtgccgcccgctggcagcgggccgctgctggccctcggtccggacgaccaggcctcgctcgcgcgattcccgccaaagatgagagaccactggtctcagtctctaaatcagcgtgcgttcgcggatctctgagactctcagaccagagaccggtccagccgttgggcgcgatcttatccagcgccgcttcgtctacgagcgggcgcgatctcggtggctcgatcgagcatgcttgcgctttgcatggccggtgatgaaagctgcagatcgcacagcggcggtggcggcacagtggccaaaagtgagagagagcaagcacaagcaagcaggcaagcatgcgtgcggcttcacgctcggatgggctcacgctctggcccagcgcttgcaagcacgcagtcgagctccatactgcggtgtcgatcggggtccgtcggctgcgtcggcgttcgaaaatccgaggctgatgatttggttcgggcaataaggttcgccgcgcgttcggcgcgcgttacagcggtcgggccaacttcaacccgtgcaacggccgcggacggcgagtttgtatggccccggttggaggctgcccgctcatcccgggcacgccatttcctggctcgcgacggcaacgtgctgccctacctggctgctgaaaccagtgctgtagctgggttgagctgccacggtctcttttggtatgagatggtctcctttcggcgagcgaagcggagatgtagtgctgctggcaatgctggctcgctctgttttctctgacaccaaaagcaggtcgggcccgcggggtccgttgagtgtgcgggccggcgttcaacgacacggccgcagcggccggagattgtcgctcgcgaacggcagggcgttttcgccgctggacggcgcgctgcacccattgacaatgctcctgcaatgcggcgacgcgcgagtgagctgcagctgggcggacaccgtggcgcgagtcccgcgttgcgacgctgccgaagcgctcagcgtgcagctgcatcgccccgtagcgcccttcgctacagcatcaagcccaagccaaactgagctgggcggcgagcgcctgctgctgggcggagctgctcgctttgtcgtccagataagatgtgccaaaaagtatcttcgccccgtccctcgtcaccggggtgcgatccggcggcacggtctctgattgggcgacatacaacacgggcagcgcagctcccagcaagcaactcgacggcctctttccacggttcattagcggatttccagcgccgtgaccaacccgcggttgaatatcgaaagctccgcgcggtcaggcaatagtcaatcgcccagcccaaatgccgtccgcgaaaactgcccgcccagcggaggactcaagccggccaccgccgcccaagcgcgcgcggctgtcgcacggccgcaagagcaagccggccacggccggagacggagacctgccggccgcgctggccgccacggccgccgcctgcaaggtgcccaagttcctgcgctcgctctacgccatcctgcagacggaggacccgcaggtcatctcgtgggtgcagaaccgggagctcaagcccaacagcgtcacggccttccacatcctcgagatggaccgcttcgagcgcgagatcctgcccaagtacttcaagcaccagaagttcgctagtttccagcgccagctcaacaacttcggcttccgcaagtggaccaagacccagtccagcggcgtctgcactttcagccacaactgcttcccgccggacctgtcggcggccaacaactccaacctgtccatccgggaccagtggcgacagaagagcacgcaggtgatcccgccgcccgcctcggccgtgggcggccagccgatcaagagacgcatcgtgggcaacggcattgccaaggccaaggtcaagcagcaacaggtcagcaaccccgcgcgtcggcgtcctgtcaacgtgcaggtcccgtcgtcacgtgacatgggcgactcgcccgtgttcgccgaaatgtaccgcagccccaactcgaacgccagcatggagagcagcgccttccgccacagtctgagccaccagccgcctctcaagaagctcgctcgaccgagcatgaagcaggaaatgatggagccactcaatggcctggaggccttctgcgacgactcgttcaggcagttcatcttgccgccgctgcagccgcaccacctgctgtcggccacgccgagaggtggcactccgtcgttctcgaagcacagcgactccaaaaccccaggtctgggtgccttcagatactcgctgactccggtgaacaacggtagcagcagcaacgtgccgagcacgttctcgaccgactcgggataccccaacagtaacaacgggttcaagccgttcgacttcaagcacgacacccagcctcacccgtacccatctgccggtggccaccagagcagcaaccacggcgctgctgatgcggcagcactgcaaggcgccttcctggagccgtggatgtgggacgcacaggcctcgtcgtcgagctttgagatcggatcgtttccgctcgagttcgactgcaagaacgattttgactgcaagaacgagttcgagtggcaggaaggatcgtgtggcagcaactaccaaggctccacggctgcggctaactgtggcggtcaaggcaaagagcagtgccatcagcaggatcgcggtgtgccgtccaacactgaagagttcggcttggacaatctgctcttcgtcgagtgaacggagtcagcgaagattaatgaggtgctcaaaatggcaccgaaacgatgatgacaaacacgcgccggcggcaccagtcggcgggcgtgtaccaacaccgaagtgaggccctccctgcatagtaagaagagctcagaccatcggcgtagcgtgtaattgtagtgcgtacgtggccaaacacgtcgaccaaggaaatcaaccagtaagaagaaacacgtagctttttgaatccattcaagatccattcattacagagttaaaggctttgttaagactgcagtctgcagtccgactggccctgaactgctacgccgtcgttgcgctcgtcggggacgctggcgtttgtggtcctgacgcccgtggacgaaccacaccttctccatcgcactcggagcaattatgctcgagcaccatcgagttgtacacgatcttctcaatgcgatggcccaggcatcgcgggcagagctgtatcgacgagcggcgggagggcaggaggttgttctgctgctgttgctgctgctgcacccatttgtccaggatgccgctggcttcaagttcctcgcgactggagtacccgagccagttcatgccagcgttcgcgctgggtgtcgacctccacgacatagcatgctccgcggccccgctagcaggaattcgagaatgagcgctatcgtggccgcatttgattgggctgctttgcaacgaagagacgccatggacggttggttggtggcaacgccttccgcctcctcccaggccttctaacgaatgctcacgctgcgcgtggctactatggccgcgatgctagctctacgtctaagcctgtgcagaggcatcgacttgatggattggtgctttcgcatcctgtccgaaacaagaggagcgactaccagtaggtggggccagactggaatccaagaagcagtgggtttcacacgaacagcagctcaacacgattcaattgcattgagctgctgtcttagtgaagtcctgccgtccacatcagcgccagctactggtgacagaggagctgatgcaacttgtccagcagaggcctcgcaacgcgggactcgcgccacggtgtccgcccagctgcagctcactcgcgcgtcgccgcattgcaggagcattgtcaatgggtgcagcgcgccgtccagcggcgaaaacgccctgccgttcgcgagcgacaatctccggccgctgcggccgtgtcgttgaacgccggcccgcacactcaacggaccccgcgggcccgacctgcttttggtgtcagagaaaacagagcgagccagcattgccagcagcactacatctccgcttcgctcgccgaaaggagaccatctcataccaaaagagaccgtggcagctcaacccagctacagcactggtttcagcagccaggtagggcagcacgttgccgtcgcgagccaggaaatggcgtgcccgggatgagcgggcagcctccaaccggggccatacaaactcgccgtccgcggccgttgcacgggttgaagttggcccgaccgctgtaacgcgcgccgaacgcgcggcgaaccttattgcccgaaccaaatcatcagcctcggattttcgaacgccgacgcagccgacggaccccgatcgacaccgcagtatggagctcgactgcgtgcttgcaagcgctgggccagagcgtgagcccatccgagcgtgaagccgcacgcatgcttgcctgcttgcttgtgcttgctctctctcacttttggccactgtgccgccaccgccgctgtgcgatctgcagctttcatcaccggccatgcaaagcgcaagcatgctcgatcgagccaccgagatcgcgcccgctcgtagacgaagcggcgctggataagatcgcgcccaacggctggaccggtctctggtctgagagtctcagagatccgcgaacgcacgctgatttagagactgagaccagtggtctctcatctttggcgggaatcgcgcgagcgaggcctggtcgtccggaccgagggccagcagcggcccgctgccagcgggcggcacagcgtggtcgggacaggcactgcttactcggcaggcatgtcgtctgcacccacagcagcagcagcagcaacagcagggccgtcgcgaagcgcgccaacgctgcggcagtaagccataccaagtgcgactcgcttcgtgacgaaccgagcccgcccactgttgtcaacaaaggggcttccgtgttcacatcttcaacgagcgcttctttttcggtggtcagaggacatgctacagctccgctcgatgagaagcactcggcgacgagtgctctggctcgagtgactcgtccgagccggagggggctcagcgccgaccgctttcagcgcgcttccacggaaagtgactcagaggcgcagcaagaggtccgatatagccgacggcgcttcgaaggttgcggagcggcccagcgttgccaacgcgctgaaaacccgccgcaaccagcttgaccggcttgacatcgacgactccttgacgctgctgtacttaccagtagcttcagagatgcatcgatgcgcggaaagaatgcagggagcggcgtgagcttagaggagacccgaacgccggtcgttggcactgtcatggtgacaaacgatgcctggtctgccttgcgctgcagcattctgagcgcctacagctatcggggagtcgaaaatggaaagccaagttggcactctcttgaacaacatggggcatctacgcgtggacgttgctcacttgcctgtagagcgattggatcacttgttcgcacccctcactgcgctacgattttttcttacagtaaactcggagtagaagagctcttgagacgttcttcgataggtggtttgcgcgggtggacgtgtcgagtacgtgagaagagattaaaccttccctgagtatgtgctgtgtgaattgacgatgcattcaatatcgctcttattgtaccggtagtttgctaaccgatactacttttgcttcgaactggggaaaatgaacatgaattgcagggtcatcggggaatttaatgcgtgcgagaaccagaaaccatttcattttacctcttgtcgtcggaggaaccgtgccatgcggatgtttgttttgggtttctagataaatgacgacatgcacagcttcacattttcagctcttcgtatcccatagtttccaaatttgctgataacggcgtcatgtttggtgtttttgccctcatggccttgtcattccactgataagtcaactgcaatgcccttgagtacaccatccatcacagctcgtagcggagaagctcatcaaaataagcccaattaatcgtgtccttcagatgatcagacgccaatactcaacaagttcagcataggaaccacacgctttgaaggctcaaagcagcaaccgtgggtggccgcaagttctttcgaataaaactgttttttttctctttcgtcctcctcgatcgcagggggctggagaatttgaaggccgagtcgtcgaatcgagaactggtctagtaaggcgttggaatggctcgggaagctttcagtaaaaaaacacgcccaccgaaaataaagaaaccaggatttcgcggtagaacttcatccatcgatctcgcttgtcggcatcagaaagctcaacgttgaaagccatcttaatgccatcaaccacgacaaacaatgggccaacttcgtttgcaatttcttcaaaacgaccacaaaattcagatgatcttgaatcggactgggatcgagagcacgaggtctgataccatgcgttcgaaaatactggacgaagtactctcgagttcctcaaacaaattcttggcagccctagctcagtcaaaccccaagaggaaatcccattccaacaactgtagtgtgattgcgtggcacttccgcacgatttctagcaatgcgttcttttcctagtcgatttctaacaaaccatcgcagttttggttgcatatccgaatgaactcctgtccagacgttgactttcctaggtgctgcttcgcacgatcttgatttacgatgaacagtctgcctcccaacagaatagaccggttcaccatccaattttcatcgccacttgctgctaataggataattggttttccaccgtctcgctggaaattcatcaacttcatcgtcggactgcttccatactacgggaacagtaacaatgagcacggattcttctgctcaatcaagggatttgatctgagcgctgacttgtaccggttcattcgagtcatacttaagtatgtcagttggttcttcgtaaatcgtgagttgacttcggagaaaagggatcagtatgcagcaaagacagcttcacgcagattctacgttataagcagtctctcaggccgcagccgcagtgaagctcttgaacggagtgcgtccgccgactttccttagccggaaccaaaccgtggctccacagtcaaccaaactttcttttccgtctcgccgtccgcaaactcttcgagagctgaagcatgaatcgcggacggaagatgatgcctggcatcgattgaaaactgctgtgcgaacagccacaatggcagcaccaccaggaacctccaagtcttgtaccgcgctccttgacttctcttcaacagcgagttactggaggcgaaagcctgcagtggtaggattttttactacccttatttcaccctgaccggaacttttacccggacctttttcccgggtaaaacgccaggtcaggccaaacatccgggtaaagcaagagtgtgcattgaagtgatatttaatagcagtgtttaatgtaagttatggtgtgtgttgagttatgcaggtgcgtagctcgactattcagcgcgtcgcagcatgatcgcagtctgggggctagaatgaccactcctccacgccattttcttcatctggatcgtggtcactgtccgagtcaaggaagaagttgtaagtgttagcgtgctcatcaatttgctgctgcaagtcttcagccgactgcgcatttcggggtggctcatcttccttcgaagagtgatcagtttcgccactacgagctgattcgactgagccgtcggactggtcgccaagctcatcatagtcaccttcatcttccgactcaggcggaacttcaaatgttgctaagtcgggggcagccggcaactcaacgcgtggtggacgctgtttcttcttgcgtagaccgcgcgtgatgttggcttgccgctgcgcgtaagcagttgaaattttggcaattgtagaaacaaagtgtcgaagcttggggtggggcttgaacgcggcgttcatctccctgttaaacctctccaaggggttgtttgtgcgcgccacgatagtattggcgataccaaacacattccactcagtgatgtagtatcgctcaagccaggtttttctaaagtaaacccaaaaacttttccactcacggcgtgagtatgggcaattgttcgcgatgcacctctgcttgatctcctgcttcacccatgcgatgcccttcggatcgacgaggtctggatcaattacagtgagaatgtccaagacgccagactccatagcgatagtcacttcgtcgtcggagatgcgctcgtctttcagtcgccggcgaatggcttgtttaaaatggaagaaacagcccaccacttcagcgttcgggaaccgggtctgaacagatgagatgaggctaaactcgaaatcacatacaatttctgcaggattgagctttttgccggtgtcgcggtagatgagatgcaggatatcgtcgtacatggactcagtctgggacgtacagagcacgaagtataccggtgtgaacaggttacgcgctgggtcatccaccattaagatcaagcactggcgaaatcctcgtggtacagatcgaaaagtaccgtcgaggaaaagagatacgctgttgtagagtaggagctctttcagcgcaggatgggcccagcctagcacacgacttggtgctttcttaggatcggggtgggccgttaccaaatggaaccggaagaatgggatggccgagtctttcactttggagaagggagggacttccacaactccgtgaatatcaccaccgtagtatcggcggcgaatgcgacggatacgcccgataacttgctcctctgtcaatccgtctaacagctcttctctatcgggaccgtagaacgcctcgcatacttgctcccaaatgtcgccctctggcattgttggattttgggttgctagctgatctgtagttcgtttcattgcgtcggtctcatcattgagttgccattcaataccgggaccggacggcacgtgtgctcaccctccacccaccaaacagcggccggggttactttgagcgtggccatacagccagaagtcttcgaagtactgcaacgatatgcaatgtgcttcttcgagtaccagttcttgcaatatcgaatgcccttgtagatcttgatcgttttcgaccctcgctttttcttggctcgtgacatgggttcctggctagcagggggtagcatcacgtgatcaccggcagcttggacttggtcagattgatcatcaagggacagcgcttgcaactcgatagtgttcccactcgcatcattgccgaccttgcgacggacggagcgcttcatcttttgctgggcacgagtgccctggcgggtcatctagacgtctcgagagttggttgtggttgaacagggagctgcgcttgtgcggaaagcaggaagatggtatgtgctgctgccttaccagtattgccatggggtcttcccatggggccttcccatgcgagaatgctgcggataagtatagttttgtgagagatttggataataatagtttcttagagtagatggcgatgtagatgatatatatgcccgcatgaacttggcaaatatatcttctccgggttattctcaggtcattgaaaacatgcgctctttttcactaagaaagagttccgggtaaaagttccggtcagggtgaaataagggtagtaaaaaaggtaacccctgcagtcggcatacgtggccctggcgtttggaggctcttccaaacgaccaccggaacaagttgaagtaacgatcgttgtacgcgtaggcaaatcacagtaataatgaagtgcaaactctgactttgctattacaaaaagtgccaataaaaatcaataagctacgcttcggtgcagcaagagatagcatgccaacgtggaatcctctggcgccgatgaataagacggggaagtctcgccggcaatgcccacttagggagccgtcacagcggtcgtggcgttttccgccttcacgggctcctccttggccgccacttcctcttcagtcgtggcagccacctccttcgtctccgtcgtcgactcctcggtcgtgacgacctcttccttcttcgactcctccgtcgcggcggcctcctcctccttcttctcggtcgcagcttcctcggacttgacggaggtcacctcctcctcttccttgggctcttcctccgtcttctccggctcaggcgccttggccagcagctccttgatgtcctcctcgaacgacagcgggaggtccgtcggcgcgtagcgcttgaacggctggccgttgcggtccaccaggaacttggtgaagttccacttgatgtagttgccgaacgtgccgggcagcttggctttcaggtacgtgaagatcgggcgggcgttcgagccgttcacgtcgtgcttctcgaacagcgggaagctcacgttgtactgcttcacgaactcgatgatctcctcgtgcgtgccaggctcctggctcttgaactggttgcacgggaagccgagcacgaccaggccttcctcctggtacttctcgtagagctgctggagctccgggtagttcgtgggggtcagaccgcacttgctcgacacgttcaccaccagcaccaccttgcccttgtactcctccatgctcacctccttcttgtccatgtcgaagtccttgagctcgtagaacgacttggcctcctcggcggccaggttgtacacctcgcggtactgtacgccgacgttcagcagggtgttgaggaaggcctcctggccctccttggtcaccaggttcagcagctcgaacttgtcgccgtacacgagcttgacgccgaactggaagtgggcgttgtcgaactggacgaagccatcggcagcgccgtactcggccagcaccgcgcgcgccacgtcggactcgaagaagtagatcttgctcgtcttctcgttggccacgacgtacacgtccttgccctgcgtgaaggccgagaacacaccagccttgcgcttgagctgcgacgcgtagatggcgccgtccacgacgttccacacagcggtgtccttggactccgtgatcgcctcggagagcggcacgaacagctcgctgtccgtcacgtactccttgggggcctcggccaggtagttcttgacgcggtccttgtaggacgtgatgaagcccgacagcaccagcgcctcggcaatctccttggcacggagacggtagggcgacggcgcctccaccttcttctccttcttttccttcttcttctcctccttggaggcttcttcagccttgggggcctcctcctcagccttggcagcctcggcctccgccttggcagcctcggcctccgccttggcagcttcttcttcagccttgggggcctcctgctcggtcttgggggcctcctcttcagccttgggggtctccttctcctccgtggcagcctcctcctccttcttctcgggctcggcgggggtctccgtctcctcctccttcttcccctcctcctgctcgggcgtgagccacttctcgaggaagtccacgagctccttgccgcgcacgctctgcggcaccttgacgagcgccgagtggtgggacgtgaacacctcagcctccttctccgtcagcagcgtctgcgccgccgccgcctgctcgcgcaggtcctcggcgagggcctcgaacgccgccttgcgggcgaacacgcggccttggagttcactcatgctgtggtgacgggggcttcttcgtgcggagtcttgctggggtcgacgctcttgctcgcaaattgcggaatgacgccttcttcgctccgagcgtctttgcttttttgcttcaacatctgctcaacccatcaaaacacgctatgcattatcagaggaggcaagcggtcgtctcagcaacagagaatacctcgagactaggatgttatgttagactcatgtggatatctacacgaacggggtaactgtttatacaggttgtcaatcggtttccacaagtaccctgtgacaatgtgcagccaagtgttgcatagaagggtaggctctcgaaccttcacttttcctgcttccttgtcggcgacaagttgtcgccccatggagcgctttcagccggcgtaaaggggctaggcatcgggacatcttgctctgcagggctgcctttgatcagaggctgctgcgggggtcctgatttcgcagcgcgagccatgcactcgcagcgctccgtggccgctgccagcatctctcgcacgccctacgcaatttttgcgcagcggccaggtcccgcgccgacttaccggtatcgcggtgtcgcgggcaccccggcgcctttcctgatggatgcgtgcgcagccgcggcgccgctgccggcgggcgggtcgtccgctcgacggcgaagcgctcagctttgccaaggcaccgagctcctgcgcggcggcggcgacggcggcgctccaagctggtgctgctggaaggcggtttcctccatcgacgttgaagtggagcggcccaatcagcgcgccgcccggcccggcccatacaaagcgccatacaagcgcgtaagtcgcttagatggagatgggcaagtgtatgcagctgcgtactgtactcgaccacaaggcgaatccatcggcccagcgtcacgatggtgctcgccgcccgccgccttggtcgaggagaagcatagagtgcggatacagcaagcagttcgagttggccagacctcgtcgcgtcaaaaacgcggtttccccgcgagcgttgattcctggcctgatgccagccggcaacttcaacatgcgaatgggaagctgcagtgcagcgtgcagactgcacgctccgagcgcttcattccaaggcttccctcttccttgagcaagccgagcttgccagttgcacgcgttggcagcggggtcgctatcctctgcaactcgcgcagaagccacatcactacgcggagctcgctgaagctgagccgcagatcggctaacccctccaagagatgttgcgtgtcgctgtcggcgactccattgcacctttgcgcgcgtggaggtgattgtggcactgctgacccagctgacggcaagcttctcggctgctcggcgggcaatgcctttccgtgattgccaagcgcgagaacaatgaaatcctcgcagctccgtgtgaagacatgggcttgaaggagaaacgcagctcgcaaaagctgggacgtcgcgaaatggtcaagtttcccgctgtacgtcccagacatgcctgagtgcgacggcaatgaggtggcgcaatggaccagtccaaggtctgctgtgagacggctccactttctgcagctctggcaaagctgcgtttgcacagctggtggaacacaagatggtggtggtgattcttaggactgaaaggtggaaaacagaccgagggccaagaacaatgttgctacctgctgtttcgcaggcgactgaacgccgagtgctgcttaaaccccgcaagttgaacatataattcatagtgattaactcccaagctactcggcactcggaacatacgacggtctcatacttgcgtgtgtcgagtatcgatacacgtcgtcgcagcagctcctgcagatggttcggatcttgagcttcttctgttgctgctggctgaggcttgagcggcggcgccccatgccgcgtccgcccgcgtttctagagccgcctaccgagttcatctgcatgccggtcctggcgttggcgaagctgtcgacggaggtctggtatccacacttgcggcacagcgacacggagtgacagatatcgcacatgtatcgcttcctgaagagcccgaagcgcttaccacagtgctgacacgccgtggcgttttcctcgatcgcgccgatggagcgcgacattggccggaacgtggccggtagaggcgtctgcatggcgtccgtgctgctgtgtgcacgcatcaagcctcccgccgacgcagcagcagtcgagggtgacatgctatcgcgctgactcggatcaacctcgatggacggcgacgagctggacgtcgacgttgatgaccgccttggcatcatcgtgactccctgtccggtagacatgctgacggcgggggccacgacctcggacgttgacttcttaatccgcttgaggcgataactgcgcgactgcgttccctggacgcccatgacgctggcacgcataagtccgtacaccgtcagaaagcacgcgaagatgagtccaagcgagcgaatcccctcggcgttgagcgtcccgacagatcccagcaacgcggccgacgtgcggcacactgaggtgctgccactctgcgcgccgttcacctgtgtccaatggtactcgtacgcgctcgacacgttgtctctgcagatggcctgaacgcggtaggcatacttgcgcccaggctggacgtccagatccacgagctccgacgcgttactgtccagcagcgtgctccactgcggctggtcctcgacgtccgggtatcgctgcagcacgaatcgctccacgggccacagcagcgtctcgaagctgcgccaccgcagcaccacagcgtcgcacgttccagccgccaccaacagcggcgagtgcgggaacgcagggtctgaacgagacacaaacacagaaccacactccacgttagtcttctcgtccgaataccctcccaactctgactacagggccgcgtacacttgcgcacgatcgtctctccatccagcgtcagcggcatctcggacgggaccagatcgtcgggggttgtttgagcttcactgtcggcgtcagcagcaacggagcagccgagatacgggcacgcctcctcgagcagcgccaacttgagtcctggtactgagagggaaggcagatggtaagtgatcccttcgttcccttcgctttggttcgttctcctggggggcggacttacgtaccatcgagggcgaacgcctgcacgccgacgttgacgctgaggccgctgagcgccagcagcaccagcaggagagagacacggccgtccaaggtcatgcgcgcgcggcgggtggagcctctgcagggacctgggcgggcgacggaatggcgagtgagccgctctcttccctacctcttccaggtggcggatgggcgcagacatgcacgtgagttgatgttcgttgcgccgcgattggtcgaaaatcggatctcagcagttgaatcggccacgatcgggcgatttcgagcatcagcaccaggccgtggccatctttatcggcgctctcggactttggtcgggctcgcggaccaacaagctgcgtgtactgtactgtggatgcagtgagattagtttagacattggtagcacgtagtggactaggaattgacgcggatacgtcgagtacatgcatattgtcggcgggctgggcacttcgaagtggaccgcacacttgagccggttcgcacatgtcacacgtatgggcatccaggccgggtccccagtgccgctggcagcggctcaccaacagtacaagtgaagactcgccaagtcttgctcatcaacttggtgggcttgcagcttcgaagtcggtcgcgccgccctgctcaccgtttgtggtatgtgtgtgttgccgctgggcggtatctgagtcaggcgatcctccagcgtgggacggagaggcgcagtatcagcaaccgcaaacgtgaggctgcaaattgcagcctgctagcgccgctagcctagcggtgcaacaattacgcagctctttctggcccaagtagttaaggcttgatccaccgcaccttgtctaatttacaccatagcaaccttggtgtcgtgtgaatcagtcattggaatgcagcaatagttcaggaattgaattttgaacgccgcttattacggcgagcatttgacctgcagctcagtgccaatggcaacagcaccaatgtgcttacctacgcatgatccgtcaagaggtagactcgttggttcaatttgaagagtacttgcatgtactctaagtatcgtacactttaaaggttgtaaagttcatatactgtactggtaatactcgatgaaaacgacatccgagaaggtattgacagcaagccttgccgtcagctgaagctggtgtgtctccagatcgagcgatggacttgtactcgaggtgtagcatacatagagtccctgaacgccaccatgttgcctctttcgaatgaggtgttcgctagtcgattaaagtcgtttggatgtagccattggggctcagtaagtgccgaagaagtccacgtctgctcaatgtcgactcagtcgagtcgagctgcccagacaatttcaactgcaacgttgcgcgtaatcattcaacgtaataatcacccaagagagagctctgctcgagcctcaagctttgctcggagcagtgctttcatgccggagacgaggtacacgtcgtactcgcagagaaacttatagttgagcaggacctattgaatatcgtgtgtggagtcatcgaccactaccgtaacgaaaccactgatgcgaaggtgttgttggaggcgatacgaatcattcggcagtggagcgagcgctctgcactcctgacgcggtttgaagcctcgcgtagtgtgaagagtatgttgctgcctgtactgatcgatctactggatctgcacgcgaggcagtcgccgatatcgcccaggcgtttggtggtcgtgctcgagatcctattgatcctccggcatctcacagcgagccctggtcttcgcagcgtacttgtgaactccgacagactggagaccattcccaagttgttgcgctgcagaagcacgtctcgtccaactttaagtagcagcttcgctgttcaagaacttgttgtcacgggccagacgtgcaggccattcggtgcctctggcctacaagatgacggtgaccttgacgcgttggtggatcgagagacccgcaatctgctcaagctcgtagcaaccggcccggatccaactgcgaagtccgtagccttcgctcgacgaggaaacgcgctcgatggacccgctgccatggtaacggcgaaagcgccacagcgacaattaagagcagagcacgtgaggcccgatacacttcgggcatacggctgtggcaaaaggtgacgacaacgcagtctaatgcaaggaagaagcgagaaatcttcaacgtcgtcctttgctgtccatcgaggagctcgctggcccatttccgcgcatcacgcgcgtgctgctcgctctcgttcatttctgaattcgccgtcttcgacagacccacgaaacactcttcaacaatcaacatgtcgacttcgggaacgctgacgatcaaggtgcacggcatcgaggcatcgttcggcgaagaaaggctggccggtgagaagctggccgtgcgtttcgccgtgggcaaggccgagcatacgaccaagttccgcaagcacgacgcccccatcgacgagcacgtgaagctcagcgtcaagcacgcgtcggctgattcgaagctcaccatcgagttgctgcaggagaaatactggaagcccctcgtgagcacgcagaaggcgctgacccccgaatacgaaaacagcgaagcgaaccgcaaaatggtgttcacgttcggcgccacagccgcgcccagcacggtgctgctctcgtactgcgccgactggcgcccgaacaagacgacgctggccacgatcgagacccaccgcccgtggttcatgcgcgcgtcctactactacgacaccaccaagaacgtgtacaactacaccacgagcttccgcattgtggccccgttcgcgcgcttcggcgagaacatgacgaacatgatgctcaccaaggtgagcggcaagtcgctgcacgatatcgacggggcctgggttggccctggcctgctagccctggacaataaggtggacgacggggttgaagtggtcgtcaaggcttcctcagccgtcttcaacgcagtggccagcgtggccaattacaccaagacgcaagtggtgcacgcttcgtcgtcgacctacggcaccgtcaagagcacgacctactcggtgctgagctacgtgccggtgatcggccccaagatcgtggcctaagcggaggaaccgactgcggattcgccaccgtatacacgcagatgcaaccaaaattgacatggtggggacggcggctgcaattgcatcaacaccagttagtttaatttttatcctttcgcgtgaattgagcagaatttgctggtgacgtaaggggagaacgaggctactgcggctaaccgaactacctacatgaacactcacatgtatgccaacagaactatccgtccacgaccgaccgcatccagaaactctcgcaatagacacaacagcactgcatcttgtcaatccagcggtatcatctgcacacccatagtccgaactcgcacgaaaacaaacggtggatgttcgccccagacacgcaatgaatccgattttaaagaaaacggtattcacgtaatgtattcaattagggatactcacaaactatgaagtagtttcttcaatgctgtacaaccacctcgcagctcatcatctcaagacacagtaccaatttacttacttaagtacagcataccagcctgggccaccgcactgcggatcgcatcacaatccaacgtaaactcgggcatcgagtcaaatacgatcgggcccagcgacgcgcatcgcggttcgccttgatctcgcttgtagatccacacgcagccctttcgggaatccacaacgacgccttcgcgagtgcccgcttccatgaacactgccatctttgcctgcgcgtcttccaggttaaccgtctccgtcaaaagttgcagaacgacagcggggacgcacggaggatacgacaactttgacatcttcttaccagacatcatgccagcgaaggtgagttcatccatacaggcagcgtcgggaacgagccaagcacgcccagccttcgttatgagctggtagcccggagtggaaaaacatgacacctccgatctctgggttgtgtcgtttccagatcgagaattgcctgctcacttcgcctcgctgcactgatccgatgccgctcatggggtactcgcgcacagtaagaaagggggacacgtactccagcagaaaacgtttttcggcgacttcgttcaaatcgggcggggtagtgagtcgatacttgcctggaaccgcgggaatgcgatctccacacggtagcaagatgaagtccacgccctccagaaatccttccgcgtcgagttgttgctccattggcccagcgcgcaaattcacttatgtggcactgcaatgattctcgttcttgctgctgtagattgatcgaaaacgaatggcagattcacggactgaagtggtctcatcggaaaagcgtgatctaactttacgtgcaaggtggaggaacgaagccaccatcgtgccgacgtcgtacacttgttctcgagcgtgacttgagcagaattttctggtaaaagccgacgtcgtcccttgctgtcaatcgaggaactcatttccagtcgcgcgcgaatgaaaattgttcttgtttacttctgaattcgccaacccgcataacacttcagcaagcatcatgccgttgtccggaacacttaagatcaaggtgcaccgcatcgaggccacattcgtggaggaggagcagaaactgcacgcgctgcgcttcgccgtgggcaaagccgactacacgaccaagtttcgcaagcacaacgcccccatcgatgagcacatgaagctcaacgtcaagaacgcccccaccgacgccacactcaccatcgaggtgctgcaggagaagcgcaagaaggcgctcgttggcacggcgcagccgctcaccgagttcctcaagagcaaccttgagcgcatcatgacgttcacgttcggccccaaggccgcaccgaatgtggtgctgctctacttccgtgtaaactgggagcctaacgacgccgaggtgagcatgcacctcccctggttcatgcgcgcgtcctactactacgatacgaccaagcgcatgtacgactacaccacgagcttccgcatcgtggcccccttcgcgcgcttcggagaaagcattgtcgacgcgatcgtggagaacgtgagcgacaagtcgctttacgagattgatgaggactgggtcgagccgggccttctagccctggacaacaaggcggacgctggcatctccgcggtccggcagtatgcgctcaagaagaaggacgatgcggtggaagtggtcaccaagaccaagaatttcatcaccgagaagatctcgtccgcttcatcggccgtctacaatacggtggccagcctggcgttctacaccaaggtgcaggtggcgcacgcattatcgtggacctgcgggacgatcaagagcgtgacctgctcggtgctgagcttcgtgccggtgatcgggcgcagaatcgcggcctagtggaggaaccgactgcagattcgcccacgcagcgtcacaagattgatggcctctgcttttgggcggctgcagagttgcagccagcccctttccttttagcctattaacctttggcgtgaatcgagccgcgttagctgacaacgtaaggaaaacacgatggtcttcttgggctgctgtggtgattgacgtgctcggctgaacacgagagttaggctgcattggtagtgtccatcgattgaccgattccatctttcattgacgtccaggtcggaagttgaagtgagatgcccgttttattcgccgtcatcttcgaacgtgatactgcaccagcttggagtccaaaccgtggggctgcgctgttgacaacgacaatggggccgacgatgcagtggccggtgcccgcgcagaccgcgctgcagtcccgcggcgcgtcatgttcgcgctcccgccaccagcaaagtgagactcccgcggccgcgcgtcaatggacacctcggtgagaaaaagcgcgatgcctttcaagcaagcccctcataatcggcaaacatcgtcttatctgggtaacgttatcctagaacctctttgaatatgcaacataacaatcacacaaattcagctccgctttcaatccgcaacgacatgtacccatttatcatggcgcgactttcgatgacgcgagtgtccgatacagcgagcgcgcatcacggtgcaacctggctggtatccattgcgctgacttctctacgatacggaagcaagcgcgcgctgctccttctcgctcacttctgaactcgccgtcttcgtcgcagaccaacactcttccagcaacaacaccagcaactcaagccaccatgcccacgtccggcacgctcaagatcaaggtgcaccgcatcgaggccacgttcgtggaggaggagcacgccctgaagctgcacgcgctgcgcttcgccgtcggcaacgccgagcacacgaccaagttccgcaagcacgacgcctccatcgacgagcacgtgaagctcaacgtcaagaacgcccccaccgacgccacgctcaccatcgaggtgctgcaggagaagcgcaagaaggcgctcgtggacacggcgcagccgctcaccgagttcctcaagagcaacctggagcgcaagatgacgttcacgttcggccccaaggccgcgcccaacacggtgctgctgtacttccgcgtggactgggagcccagcgacacggccctggccgtcgtggacacgcaccgcccctggttcatgcgcgcgtcctactactacgacacgaccaagagtgtgtacaactacaccacgagcttccgcatcgtggccccgttcgcgcgcttcggcgagaacacggccaacacggtgctcaccaaggtgagcggcaagacgctcttcgacattgacgaggcctgggtgggccccggtctcaacgccctggacaacaaggtggacgccggcatttcggcggtgctcacgacgctctactcgggccagcagtacgcccttaagaagaaggacgacgccgtcgaagtggccagcaaggccaaggacttcaccaccgagaaggtctcgtccgcttcgtcggccgtctacaacacggtggccagcgtggccgactacaccaagacgcaggtggttcacgcttcgtcgtcgacttacggcaccgtcaagagtgtgacctactcggtgctgagctacgtgccggtcatcggccccaagatcgtggcctaagtgcaggaaccgactgcaggttcgcccatgccgctgacaacgtgagcttcatcggatgcaagcagacacaagatcgacatcgtgtcgaccgatcctactttttggcgactgcgatgttgcagtcaacatcttttcttcttagtgtattaacctttagcgtgaattgagcggcaggtgctcctaacgtaaacaaatacaatggtctgctggctttaaacaactcatgaacaaacaaggatcgacctttgttactggatcccgagagcttcagcccagcgcagcacagcttcgtcgtcgagccacaacagcaccatcggcatggagatcaatactacaagcgtcccgaggtacgacggccccaccacaggtggccctgacttggtggatagaactcgcagggttgggctgagagcggcagtagtactcaacgttggtgcggcaacgtcgagaggagcagcgtccacgagcagaccacgtgtcttcgccgcggaatttggtggttggtcggcctttggcgtggccaagctggtgctcggtagtggctcgctcggaagcgaccacgatgttccgtttactaacaaggcagcaactgcgttgaagcactcctgggtgtttgtgccgtcccttgacgagcactcgaagaagcgtgaagccccgattatccgagagagctcacgaccctcctcttcgtgcacttgtcgagatccgtacgctgcatcgctcttgtttcccacaagaacgattgagaacagcgagtccgcgactgcggtgcttcggtaagccaggatctgcatcacccaccgcagcaccgccgcgaagctgagccggttagtcacgtcgtagactacgatcgcagcgtttgtgtggcggaagtaggaactcggcagtcgagctgctccgaatttctcctggccagcagtatcccacagctgcaccttcatgggagcagcagcgccctcgacgattgccatcttggacaggtagtcgcttggaacactatcggcgggcgatagcggctcaaaactcgtcatccgacgcagtaagctcgacttgcccacatcactatccccaacaacaatcactgcagagcagcaaaggcgtgaaagtgttcgttagaccataagggattgttaaggtgtactatacgattgtcttcctacctttgtacgtttggcacattttctttttcgggtttcgtggcatgatcgaaaagccagcaccatgttgcagtaagctaggcgccatcgccgtcgattgagttgggatgagttgagtcgagtttgcgatacagatgaaattgtagtgtgagaggggagggacgtcttgcatgcaaaccccaacgaccagcagtcagtctccactgcaaagtcgtcgcagcggatgcatgtataaaggctcaccttcgacccacaagaaagggcgcatacccacttgacgacaacgcgcagctcgtgcttctctccttccgtgacccgctcgatgctgctctttggcggtttgtgtcagtgccgccatccaacgagtcacgggaatcaagctctcgccagtccatcaaatgcacggaaacgatgggcaagtacgaaacgttcaagttacgagtctcccggcacatcaagaagccgcgagagccatccgagcgagcaacacaactccaatagagtgactccactccactcattcattcattgaatccattcattcaccacaacggaggaattcacgttagtctcgcacaccgactatctcttcaggcccggtgtccacgacagcacaagtatcgccttttggtctcacgcgtggcaaccggcaatcaacaagtagcgagatcttgacaggcgtacgagttgaagcaaaactaggagctcgttccacagaaacagccaagtaaaaaaaatgatcgtgcgtatggatatgtagccatcttggccaatgactttagtccgatattaacatttgatgtgtatccatttacgaaattaatccacttcaatccgaaattaaagcattttctgacctcttcatcgaccatgtccaaggccctccgaggacgcgtcttcgacctgtggcgccacttccaggcgcttcccaccaagttccaaggcgatgtagacctcatccagcgtcacctgctctctccggaggtcaagaagcagctcttcctggccacagagcctcctctgccttgcccaaagtatctggcgactctctgctgcgtgtcattggccagaaactagagcaggagcccgaagctacctacactgtacaagttgccggtggcctggtgcagagcggctttttgacgcctacaacggactcgaagctgctccagagctttgatttcgagagtaaaaactcggagttcattggagttggcaagggactcgcccctgatgaagtgaaatcggtctggagcgtcagggaaggaacaatccaggctggcgcattgcaccggaagaaggagggatttctggccaagttttttggcggccaggaactgtgttacgtcgtggccaatgaccagaacaggactgtgtacatctttgactctgacgtggccttcagcccacgtgatgaaatggatgtggcgaccgatgcgacggtagagtttagtgaggaactcaagcacggcatcaagctggccaaccccaaggccacggaggtgttcgcggccgagagcaaggagaagcaggaggagtggctcaactcgttcatcaacgccggcgcgcagtaccgcgaggtgttcaacgtggccgacacggccaagatcaagtcgttctacgagctcaaggacttcgacatggctggcaacgaggtgtccatggccaagtacaagggcaaggtggtgctggccgtgaacgtgtcgagcaagtgcggcctgacgcccacgaactacccggagctgcaggagctgtacgccaagtacaaggacgagggtctggaggtgctggcgttcccgtgcaaccagttcgccggccaggagccgggcacccacgaggagatcatggagttcgtgaagcagtacaatgtgacgttcccgttcttcgagaagcacgacgtgaacggcgcgacggctcggccggtgttcacgtacttgaagacgaagctgccgggctcgttcggcgactttgtgaagtggaacttcaccaagttcctggtggaccgcaacggccagccgtacaagcggttcgccccgaaggaccgtccgctgtcgttcgaggaggacatcaagacgctgttggcgcagaaggcttcggaagagtaaaggtcgagttggcggtgcgcgctgaagtcgcagctatgaccagcttcgttaagaaaaaatgttgtttattgacctttcttctttgttgcctgtagcatccgatgtgcttgccttgggtgttgctttttgaatttatgatatttggcaacagtatccatagctttgatgctgcacgaactggaacgccattgtcccgaggctaccatagacgcaaagctgcatgaaagcactgctccgaccaaagcttgaggctcgagcagagctgattattacgttgaatgattacgcgcaacgttgcagttgaaattgtctgggcagctcgactcgactgagtcgacattgagcagacgtggacttcttcggcacttactgagccccaatggctacatccaaacgactttaatcgactagcgaacacctcgttcgaaagaggcaacatggtggcgttcagggactctatgtatgctacacctcgagtacaagtccatcgctcgatctggagacacaccagcttcagctgacggcaaggcttgctgtcaataccttctcggatgtcgttttcatcgagtattaccagtacagtatatgaactttacaacctttaaagtgtacgatacttagagtacatgcaagtactcttcaaattgaaccaacgagtctacctcttgacggatcatgcgtaggtaagcacattggtgctgttgccattggcactgagctgcaggtcaaatgctcgccgtaataagcggcgttcaaaattcaattcctgaactattgctgcattctaatatctccacccaggagcaacacacacatacacaaacggttagcagggcgacaccgacttcaaagctgctagtccgccaacttgttgggcaagacttggcgagccttcgccgttagggagaccctgaaagctccaggggtagtaatgcatcgaaccgctggtgtggatgtgagcaagctagtagaatgtttagtcgtcatctgcagaattccatctcaacaagcaacgctattagagtggatttagtatttgcaagttgatgccgcgcacgagtttaagtgaagtcgtatgtaggttactcgaaagtccgagcaaatgtacttgaaagtaaggacaacccaagacgctgttggcgcagaagaccgctgaatcatttgctgcaacattgcaaacttggatttgttgtcaagactgatgtgacgacgccccgccaagcgaccgtgtgacgtgaacgcgtcatcagtgaggtcggcgtgaccttcactgtgtggtaccgaaatcattcaggtgattacgggacgatgattacgtcacggtgattacgccaagattgtgggtacaagatgggcatcgacgtggtgttctctgattggataaggtaactgtgtatccagtagagaatccagtagggtgtatccagtaagaggtatccagtagcaggcttagaggtagcacgcggttgcgaactaaggacctgaatcgaatcactttgcattttgccaactactgctcaagtgctcttccttttggttatgagcccaagccccgtcttccctgaccaagaccccgactacgccttcgccatggacgccgccccgaccgcgaccgcccgcatcaacaagttcgacggaaccaacttccacacatggaagttcaagatgcagatggtgctggaggagcgcgaactgtgggaagtgacgagtggggaagtgaagctcgagcagtgcacgaccgcggcggaccaagcgacgtttcgcaagaagtcgcgcaaggcgctggcgatcgtctgtctcgcgttggaggactcgcagctgccgctggtgcggtcggcgaaggacgcgcatgatgcatggtcaagactcgagggacacttcgagaagaagagcctggcgaacaagctctttcttcgtcgacggtttttcacgacaacgatggacgaaggtgatgatgtgctggagcacattaacaagctcaagacgctggcggaacaactcgacgcggtcggcgctccggtcagcgaggacgacttggtgatcacgcttcttgccagtctgagcgagtcgtaccagttcctcatcacggcgttggaatcgcgctccgacacgctgacgtgggagctcgtgacgtctcggctcctgcacgaggacatgaagcgcaaggaacaaggtggcggtgctgacggaaccgcgcacgctcaaggtcaagcgttcatgacaagcgacaacgggaagcgcaagggacggcaggcgcaagcgcagaggacgagcgcctgtcactactgcggcgagcacggacattggatcgccaagtgtccggtgcggatccgcgagaacggggagcggcagaggccgcaacgagcgaacgtcgcgcaggtcgaagatgactctggcgacttcctcttctcggttggtggcgacacgggtgcctccaagctgagcggcatgtggctggtcgactcgggtgcgacgcagcacatgacgtactcgaaggagtacatgaagaactacaagaagatctctccggtggacgtgcatctggcggacgacggcgtggttcaggcggtggggagcggcgacatcgtgatgtcgatgcagacaccgcgcggcatgaagaagggtgtgctcacgggtgtgtggcacatcccgaagctgtcgcgcaacctgttctccgtcggccgcttcaccaaggacgtcgggccagtgaccctcgagagcgacgggtgctttgcggaaacgaagggtctcaagtggaagctcggcgctcgcgaaggcaaaggactgttcaagctctgcatgacgccgaggacgcctgctgacgaggccaatgcggcaagctcgaagaatcgccaaggggacaccacgtcgtacctctggcaccttcgacttggtcacatcggccatggtggtctcgaagccatcgtcaagaagggctacggcactggcatcccaatgacgtcggtgaagcagtgggaggtgtgcgacgggtgcgcactcggcaagcaaacgcgagtaagcttcatgaagtcgtcgccgaaccgtgcgaagcaagtgctggaggtggtccacagcgatgtgtgcggtccgatgcagacggcgacgttcggaggcaagcgctacttcgtcacgttcatcgacgacaagtcgcacttctgcgtggtgtacctgctacggaacaagtcggaggtggctgccaagttcgctgcgttcgtcgcgttggctgagacgcagaccggcaagcgagtgaaggtgcttcggagcgacaacggcggcgagtacacttcgggtgcgatggccaagttgtgtgcggatcgcggcatcgagcagaagttcacgccaccatacacgcctcagctcaacggagtggccgagcgaatgaatcggacgctggtggagtgtgcgcgctgcatgctggagcacgccgggttgtcgaaggagtactggggagaagcggtgatgacggccacgttcctccgcaaccggtgtccgacgcgcgccatcagtcacgacaagtcgccgcaccacgtttggaccggcaagaagcctttgctggccaacctcaaggtgttcgggtgccacgcgtacgtgcacgtgccgaaggagaagcggtcgaagttcgacgctcggtcggtgcgctgtcgtttcctcgggtactcggagcacgagaaggcgtatcggttcgaggagatcgagagcggtcgcgtgttggtgagccgcgacgcgcagttcatggaggatgtcttcgacggtgggagacgcgactacgcttcgaaggaggtgttggtgggtcttccgacagatgatgatgaagacaccacggatgaagagactcagtccggatcagacgagaacagagaagaagctgcgcggaatcaagactttgaacccggcagcaagcgacacccgcgcacgcagtcgctcgaggaagccgtggaggttccgagtgccaagcggtatgcggtgccaagacgacagcaaccgctggacgagatgtctgccgcagcacaagagaaggaagacttcgaggctgcgtacgtcgtggattcagtgggagagatgccgacaacgttcaagtcggcgatggaatccagcgacgcagacaagtggaaagaggcgtgcgactcggaggtggagtcgctccgcaagaacgagacgtggaccctggtgccactgccgaagggacgcaaggcgatcggctgcagatgggtgttccgcgtgaaggagaaccagtctggagagatcgagcggttcaaggcgcgactggtggcgaaggggttctcgcagaagtacggcatcgactacgacgagacgtttgcgccggtggccaagttcacgtcgattcgggtgttgctgagtctggcggccaagtacaagctcacagtgcaccagatggatgtgaagaccgcgttcctcaacggcttgttggacgaggacatctacatggcgcagccggacggatatgtggacggagatcgacccgactacgtgtgccggctcaagcgttcgctgtacggcctgaagcagtcgccgcggatgtggaacaagacgatcgacgagttcatgttgaagctggggttcaagaagtgcgagtccgaccactgcatctacttgaagcgggacaatcacgacatgatgttcgtggcactgtacgtggacgatctggtcctcgccagcagcagcgacaggatgctgaaggacacgaagcaggcgctgagtgaccggttcgagatgactgacatgggccagctcaagtactttctcggtatggagatcgagcaagatgtggcgactgggaaggtgtcggtgcggcagaccaagttcgcgaaggacattctcgagaagttcaagatggatgagagcaaccctgtgaagacaccgcaggatccgggtctgaagctgaccaaggccatgtgcgagggaggctgcaagcacgacgagaccatggcgaatgttccgtaccggaacgccgtgggctgcctcatgtatctcatggtggggactcgtccggacctcgcagcggcagtgggagtgctgagccagttcgcagcggacccatgtccgacacactggcaggcgctcaagagggtcttccgctacatccgaggcacgaagacgcacggcctcgtgtttcaagcgagcagcgaggacggactgcaaggctactcggacgcggactgggccggcgacatcgagtctcgacggagtacgagcggctacgcgttcgtgatgaacggcggatgcatcagctggcgaagcaagaagcagcgcacggtggcgctctcgtcgacggaagccgagtacatggcgctgtcggaggccacgcaggaggcggtgtggctcaaggtgtttctgtgcgagctgggcgagatggcgagcgatgaagcggtgaagatctacgaggacaaccaaggctccatcgcgttggccaagaacccggagttccacaagcgcaccaagcacatcgacattcgctaccacttcgtgcgcgagaaggtggaagacggtcaagtggtgttgcagtatgtttcgacactcgacatgctggcggacatcatgacgaagccgatcgcggcgccgcagttcgacgcgctcaggacgaagctgggcatcgtggtcgctgacgagtcgagtgggagtgttgtcaagactgatgtgacgacgccccgccaagcgaccgtgtgacgtgaacgcgtcatcagtgaggtcggcgtgaccttcactgtgtggtaccgaaatcattcaggtgattacgggacgatgattacgtcacggtgattacgccaagattgtgggtacaagatgggcatcgacgtggtgttctctgattggataaggtaactgtgtatccagtagagaatccagtagggtgtatccagtaagaggtatccagtagcaggcttagaggtagcacgcggttgcgaactaaggacctgaatcgaatcactttgcattttgccaactactgctcaagtgctcttccttttggattgaagcttagacctttcagaaaagaatgtaatggctctcgttctctgcaggcagtgagtgttgattgcattttgttttggtgggacgagcttcaacacagcagttagatctgagactggacgtgttgtgcgatcctgatacctggctaaccggtcccacaactacttagcactagaaccaaagaaaacaacaaagatgcagaccagaatggggaagaaaccacgtgtggagcagtgcgcaccgagcgcgtcaaaccgatggagtttggacggctccatggatgtattggtgcagtggctggagaccccaggcaactacgaccgctggcgcgacagtccgtcagcagcctgccaagatgcgttttcgttcctgaaggagcccgggatcgaccacagaagcgcgggggcgataggaaccaagatctaccgcactaaggagaaatggggggacgtcaccacattgctgaaggactcgggtctgtttgacgcctataagaagggtgaagttgacgctggaatacgtgccagcgtgaacaagaagtgcccggtatacgatcggctttcgaccgtgtttcgcactgctcgtgagcaggcatgccgaaaatacgatatatatctattgtttgccggacaccataataaatattgcattgcatccgagtatcagactgaataaataacgcaagacatagtgtcgacacagtaaattactgcaatcatgttacgactgtacctacttacaggcactactccacggtcgcaacatcccagtacgagctgttgatcttgaggaacaagatcatctcaagcatcatgggggagaggtggtggcgctcatggcgcagcatagcgcgcgcaatgctgaagagcctctcagccatgtttgaggtaggaggaatcgcattaagcagctcgtacgtggccgacgcagcagctaccttgcgtcgcttgagcgcacgcacagcgaaaccttccttgtccgccggcgtgcagtccacgccttccacatgatcctgcgtgcgcttgaacggctccagcgcagcgacttcgtcgtccgtcagcagggccgcctggtcgtccagcaccttgacgaccgcctgcacgaagacggcggagtggactatatccgcgtcggtggctatgcataaataaaaacatataaaacgcagtagttaagtagaaataccatcagacgaagagtgagcgatgatccttaccgagataattcgcgaacgaggggtggctcttgaggagctcgtcgaataggacacgagcgtccagcagcgtaaggccgtcgccctgcaggtgcttggacacggactcgacgtcccggaggcttgccagcaaagtctccagcttgcggtgggctgagcgtgacggaaggaagtccgcgagctcctcgtcgtccgccgaaatgaacggttgaaaaggtcgacgaccagcgcttgtcctgtctgaggacagcggccaatggggtcttggcactaatttcaaacaaaacccaaaaacaaagaccaatttagtaccaatacaaaaaccaaataaaatagcaaacagagtacttaccacaatttggctgcttgttttaaagtccgcaacttacgcataagctgctggatctcttcgaggatgctgtcgtggggctccaagtagtctcgcaccgccaagttcaggcggtggctggcacagccgattagcggcacaccgagtaggttcgcaagccgcttgtttactccgcagttgtcaccaaccaggaatagacatccggagatagacttaccaaaaaagggtaggaaccttttaatcgccgtcagatggccgtcagcgctcagccggtcgtcaggctcatccatgacaggcgctaacgacagcagcgggtactgggggcctgtcgccgtctcaaagcagccatacactgccatgtagtgctccgtgccgtgggtccacccatcaaggaccagaccaaaacgctcgggcatggtgtcgccgatcatcgtctccatggccttggtcacggcctccatgatggcggtcagcgtctccacggagatgggagttagcttcgtgtatctacataacatacggcattagcacacatgtaaatcaccaaaatagatatgaaaatacgtactgtcgcgttttcttggactcgcaaaaagacagcggtagattgcccgtgacgatccagcgcagccacgcgtagcggttcgaggccttctgggtgacccacggcagtagggtccccgtcgcagtgtattgctgtgattaactgtgttgtacttcagcatatttttgttgttcgcttaccagcaaacttgccggttttcctgctttacagagctgcggcatgcttttttgtgtggtgggtgcactatgcctaactttagttaagcttagtttgaagaaagcgctaggcctcttccaaagtagtaagcaatatgtgcataactgcagcttcgacttggaagttcgaggaggtcgagtcgaactggctgcgcgcaatctcacccagcgttgatggtcctgctggtcctcactcgcttgacctgcaactatgacgaaccaccgtgagcgcactaaacggacctcgcacgtcggagcatgctccagctccgcagcaagctcacagctcgccacctcttcgttcatgaccctctctcttttcacttagtcgagacgcagtggattctctcctgcatacgttgacctgcgcgtttacagcgatgcagccgccgcaaccattctgcagctcgaggtatccacacgctccagccctacctattcctgacatacccaacgccagtcaaaccttgtcacagcttttctgccccaccgcctccttcccaatcttatcttcatcattcccccaccgcataaccgcccattcatcagctcactccgcgcagcacaagccgaagccaagacaacatgagcaccgacaacaagaccgagggcgttatccaggccggcagcctgtaccgcaaacgcggcggcctgctggccaagctcacgggcggcaagcagctcgtgtacgtggaggccaacgacaagctgaagaacgtcaagctcttcgagtctgagaccaacaaggcctcgcccctggccaccgtggacctggcggctgacgccaccgtcgagttcgacgcgtccatgacgcacggcatcaagctggccaaccccaaggccacggaggtgttcgcggccgagagcaaggagaagcaggaggagtggctcaactcgttcatcaacgccggcgcgcagtaccgcgaggtgttcaacgtggccgacacggccaagatcaagtcgttctacgagctcaaggacttcgacatggctggcaacgaggtgtccatggccaagtacaagggcaaggtggtgctggccgtgaacgtgtcgagcaagtgcggcctgacgcccacgaactacccggagctgcaggagctgtacgccaagtacaaggacgagggtctggaggtgctggcgttcccgtgcaaccagttcgccggccaggagccgggcacccacgaggagatcatggagttcgtgaagcagtacaatgtgacgttcccgttcttcgagaagcacgacgtgaacggcgcgacggctcggccggtgttcacgtacttgaagacgaagctgccgggctcgttcggcgactttgtgaagtggaacttcaccaagttcctggtggaccgcaacggccagccgtacaagcggttcgccccgaaggaccgtccgctgtcgttcgaggaggacatcaagacgctgttggcgcagaaggcttcggaagagtaaaggtcgagttggcggtgcgcgctgaagtcgcagctatgaccagcgttgttaagaaaaaatgttgtttattgacctttcttgtttgttgcctgtagcatccgatgtgcttgccttgggtgttgctttttgaatttatgatatttggcaacagtatccatagctttgatgcagcacgaactggaacgccattgtcccgaggcaaccatagacgcaaagctggggtattgtacggtaaggcgaagatgtgagtcgagtgtggcaagcagcgagctcatcacatcggcttgagactgccaccgatcgatcactgacacgaaccaccacgtgctttccgtcggtgagaacagactctccagcgattcaacagggtactggcgcaccagaagcagagtcatagtgagccacgagcgaattgcgccaacgtccttgttgaagactacgaaacacttcaacatgcgcttcgagatttcacgcgcccacttcgcgccttcagatgaacgttctctatcaaacagcatccgttctgtaggccgaggagaggagtatagcgccactagaacacgcaacgcaaggacaacaagtccatgtgctcgtctccgtggagtttggactagtagaaatcgatccatgactcccatcaagtcctccaatatcagtagcggtcgaagcttcgtgacgtggaactcgttgctagagaacagggactcgcttgcacgcagcgacgcttcttggacgcggatggattcggggtgggccgaccgcatgctgaataactcgttccacatctcgagctggcccgcttggcactggaatcgaatcgatgcttgacatgccaacgatatgatccgacctagagcccattgcacctcttcctcgcgcaagtgcgaccgcagcaatacgcgcaacaactgcacactcttttgggtcgctagcgtcgtgtccaccgcagcctgggcctgaggatgatccgctatggcattgtcaatacaagtcaggttcctgtacacactgtgtatcatccggcttcgcctccagttctcctagtgcatcgtgaatttcttgcttggctgctgccagccccgcaaggctcatgagcttcgcttgctgcatcatcttacacttctagaaaccctagaagtagtgaacgtcggccgagaatagtgtcgaaaccaactcaatgctgagactttgcgtcgtgacatccaaggaatggcatccacagcagtggaggcgactcgaactccgagtgttgagctgcgtgaccgagttgaacttcttcccgggaaacttgccttcggcttggcttcttcagcactctcaggtgaaaaggcagccacgcccagacaaactgagaaccccaagagcccaacggaggatgattgccgtcttcttgatgacgaattcgtctgcatggatggcgacttagtctacgctcggttcttcgcagatttcgggcccttgcacttgtcgcgaaccgtgcgcttctgtcgcgacttggaatcgcgcttggacttgaaaaactcagtgggaagaagtggaaggcgactggtgctctactgcagcgatcaccctcacaagcgcgcgaacgcgatgacactgctcgcgatcttcttggtcttggcccgagggttctcgcctgagcttgctgtgacccgagtgttgaaggacggcaaactgcagcctccattcggctttcgagacgcttcttgcggagtgtgcacattcttcatcaccttgctggactgcgctcgagcggtgcacaaggcggtattgaagtcgctgtggagctaccagagctttaacattgacgagtacgaccacctcgaccgtctggagaacggcgacatcaactggatcgtgcctggaaagctgatcgccttcagcggcccgcagcgtgagcgcatcgtcctggacgccgagtccggcgcgtccacactgctcgctcgagactacgctgcgctcttccggacattaggagttacctgcgtgatccgcttcaacgaggccaccacgtacgaacgaaaggccttcatccacgccggtctgcgccatatcgatctcccattccctgatggtagcaaccccagcgacgacatcctccacaagttcatccgcgtacgtctgcgaaagcttctagcgtctgctgtcatgataacttaccttcttgtattgcaggtgtgcgagcgtgagactggtgctgtggccgtccattgcaaggccggccttggacgcacaggaaccgccatcgctgcgttcctcatgacgaactaccgcttgtcagccacggaggccatcgcttggtgccggatctgccggccagggagcatcgtcggcccccagcagcacttcctcgccgttaaacagcccgaactccacgcactcccgtccatcttcgaagtagtccctgtgaccaaaccaccacagccacaacgtcagtccaagaagagctccatgcctaccaaactcgagcgccttccacgccatcaccagccgagagcgcacgtaagttccaggtgaagaaaaacaatttatattcattgctttctcgctacgtggaccccgttgcataaaattgttggtccctatctgtcggaatcgagcccgcggtcatctctctctccgttccctcgcggtccaagcactcgcaatcagaactcccctcatacgttggaggagccggcgtcatgcttggaggtcctcgcccacgcagcaacacatatttagctagttcgtggcctgctacgccgctccgtcgtcgcgctcccagtcctccccacggcccgtgcgcctcaccgcacgccgcttatactccactttcttgtcccgtcacgttgttttttctgcttgtttcgcttggttttctcctccgcatgcactcggacgtgagctgcgcgcagcgctcacttgttggttcccgttaccggtggggtgacctgctgtcggctccccacctcacgcccgtattttgggcccgagtattggtatatgcctcgcaacagaataggtcaccccgcgcaccgctccgtaggtcgacgacgacgcgtgcaccacctgggaactcgcgtagtcggccacgccggtcacagtgccgtacacggcccccgtcgccgacgccaccttgtgcgtcgtgtagttggccgctccgaccaccgtgctgcccgtcttgtgggcgacgttggacacggcgcgaacagccctgtccttggtcctcacggccatttgctggccctcgtagagcttcgtgaaggccaccgagatggtggcgtccaccttattgtccatggagtccagcaccggcaccaccagcgactggtccacgtcgtagagcgtcttgcccgagaccgtggccagcaccgtgttcaccgtggcctcacccagacgggcgaacggcttcacgacgcggaagctggtcgtgtagtcgtacacgctcttggtcgtttcgtagtagtacgacgcgcgcatgaaccaggggcggtgcgtctcggccgcggccagcgtcttggtcgacgactgctcggccggcgtccagtcggcgctgaagaccagatgcatcgtgttgggcgccgagacggggccgaacatgaacgtcatcttgctgtcgtgggagtcctgcacgaactccttcaggctccgcctagcggacaccagcggctttgcctgatcttgctggagcacttcaatcgtgacttcctcagactccgccgtcgcctgcatgtcgctgtgggtaatcatagatgattgcgtcgcagttaagaacacacacatgcataaccgttagatagctggatcgggcacatatcattctcggaggagacagagacgtactagtgcagggcctcgttgatctcgatgagtttgttgtggccgacgggcgcgaaccgcgtgtcgtgcacgttatcgcccacggccagccgtatgccgtacctggcctccggccctccgctctgggccagcgaggcctcgaggcgatggactgcagcacgtcaaagagagacagcaacagcaagggtcagcaacacgagcgacggccgcagatagtcggcagcttgtatgtagtacgcacccctcacggccagtgtcccggacaccgccatcctgatccccaccgagacttcgcactcgcttggccaattcggaaatgaactgccgcctttggtcgcgcgggcgcagagcggagccatcatccggagcggaaagttccggctgccctctgtgccctctcgcccgcgatggtgggcgcagcgtctctgtcccaccgcactcggcgattgtatgctgcgacacagtggacacccgacagagtcaacgctggactcgctaactgccgccagcctgcctggcctgctcgctgctgccaggatagcaggcagcagccaagccgtcctgccagccgcagagaagcccctaggtgctgtctcaagcacgcgcataacggcaaaggggggaattttggctgcccgccagcagcgcggcgggcggtcacggctgaaaagtagccgagcagacgccgcaaaggcaaagatcggcgccccggctccgcgcaagtgacaggaattttgacatgcaactctgacgtagagcgagtcattttgccagttgtcgaggcgagcagtacagtatccttacaatgtaatagggaccaggaattatagagttgcccgatacaacagattacacaggtcttttccatactatttacttgatacctcttgaaaacgagatcaaacctactaaatatttggtttagaagtatgcgcattgtacggaaaatactgtacatgtcgcacttagccggggccctgcctaagcttgaagccgttggcggttgaacgccgaaagatcgacgcgacgtcggaatctcttgcagcggcagagacaccgagctgccaaaccgccgaggcctgcaatatttgctcggcgtctcccttctggacggcggggtgtctactacgaaggcggcggcttcagtgttcgcgatcaagcacagcgcggactgctcgtctgcgggcgcgtcgcagggctcgccgctctttgccggtcggcagctgccgcaaaggatagggatcaggactcctgattcaggagcggtgagcgctagccaagtgggaccgtgacggtggtcgccaagcgagatccactcgttgaagcgggcagcgggcgttgaggcccgagttgagaccgcgctggctggagggcggacctcggccgaagcagcgcgggcaacacggggcggactgcactgcgctgcgctcgacttcatcggcatcttgcagtacatgtggtagcagcctgctgcttgctcctccgcggcgtgctcgccagccgcatcctcgcagtacccaaagggagagagaggctcaacctagcgccatctcgcggacctgacgctgccgacacggcaactgcatcggggccatccaccacgctgcgagccagtcatcagtgtccgatttcgaacccccatggtacagcagccagcaggacagcgaagagcggacttgcgcgtcaaccagtgtccggcgtagcagcgcgagtgtgtgcagggcgacggcgaggctgacgagtcggcagtcgatggccattccttgctgctggctcgtggtgtagcgacgacgctgcaccggcggtggcaggaaactgctcgtccggggctcagctgcggccgaggacggcagccgcagcgaggcagacgcgctcgtttcgatgagaagctcggagccgtccgccttgcagcgacgcggccgtcgcaaaggatccgccgcaacggacggcaacggtattatatgcaacaaaggcaacgtgtacagtagacgagcagtgcgcgtctcgtgtggcacacacaaaccgacaacgctcggatcaaggtgtctgtgtctggcagcatgatttggatgcggcgccgcgcgaaatcaatcgctgctgctttccacgcttctcacgacgggctcggcgcttctcgggagcaagagtccgtggtcgctgcccaaaattcccgccttgaagtcggctctgacatggcgaaagccaaagcgacgtcgcccgccgtgtgaacggcatccgcgcgattccggtgtgaactcgcgttctcttaactctacagtacggagtccacttggactccacggtggtctccatcgcagtgatggctccactccaaggctcgaacactgaacgcaccgatgaacgccatccaaggcgcgtcggccgcggagatggcgctcgctcgcgactttgagatttgcactcggctcagtggtgcagaacgcagtctatagaccaggcgtcggccgcccccagtcaggatgccgcgcgcggtgcatcacgcttcgaggtcgacgtaggaccagatatatcgtccaccacctcgctctcttccgggctgccaggaggtgagcttctcgccggccacttccattttagcgccagcgcgagaacacttcacacctcccccacccaccccctgcagacccagccatgccgacttcgggcacgctcgcgatcaaggtgcacggcatcgaggcctcgttcggcgacgaggagctggccggcaagaagctggccgtgcgcttcgcagtgggcaaggccgagcacgtgaccaagttcaagaagcacgacgcccccatcgacgagcacgcgacgctccacgtcatgaacgcccccgccgacgcgcagctcaccatcgagctgctgcaggagaagggcaagaagccgctcgtgacgacgcaaaagtcgctggccgagtaccagaacaacgcgcagaaccgcaagatgacgttcacgttcggtgccaaggccgcgcccagcacggcgctgctcgcgtacagcgccgagtggcgctcgagcgagacgacgctgaccaacttcgagacccaccgcccgtggttcatgcgcgtgggctactactacgacacgaccaagaacgtgtacaactacaccacgagcttccgcgtcgtggccccgttcgcgcgcttcggcgagaacacggccaacacggtcgtggagaaggtgagcggcaagtcgctgcacgagatcgacgaggcctgggtcggcccgggcctcaacgccctggacgacaaggtggacgccaccatctcgtccgtggccacgacgctctactcgggccagcagtacgcgctcaagaagaaggacgaggccgtcgacgtggcctcgacggtggtcaagaagacgggcgagaccgtctcgaccgccgtgggcgccaccgtgcacacggccgccaacgtcaaggactacacgaccgagaaggtggtctcggccacgtcggctgtgtacggcaccgtggccagcgtggccgactacaccaagacgcaggtggtacacgcctcgtcgtcgacgtacggcaccgtcaagggcgtgaccctcacggcgctgagctacgtgcccgtgatcggccccaagatcgcggtctaagccggcggagacagcagcggctagcttgtttttatcaatttatgtttataagggctcctagcaagcccagagcgacgaaaacgatgtcgaagcgttttaagcatgcataaatgacaaacgtgttcatgttgaagtggttccatctggttggcgcaccggggcaacaggagaacggatcctattcactctggcgccaaagctttttaaaggttaggcgccagcatgcggcccgtgttaactgcgacgtcgtgacttaaagttcgccggacactattcaccgcgcgcatggaactcaccacagcattgacgagtcctgggcgatagacgccggtggcgtggattcatcagcattgacagacatccttcggcttggatgcctatcatctcggctgatggacatccaagctgatgaatccgtgggtactgtaggtgttagtcgccccaccagaatggtggaggtgatcggatgccgttcacacgccagcgacgccgctttccttatcgcgacgagaaactctcgcagtgtatgaactgggacgactactgctaataatgatgtccaagttggactccaaccgcgtgccaaggatatcacgaccgccgagcccgccgtgaacggcataaaaagcgagcgattctgcgtggccgtagccaaactcaagctggcacgactagcgctgcagcagaacgcaacgtcgcctcttcaggatcgctggtcgcgtcaacacggtgcatgttgttgccctgttggcgccccatgtccctgcaagtttggtggtccccaccgtttccttcccgccttctttccttgccgcagctgagcggatgaagcttttcagcggtctgcgctgcagaccgatgagaaagtgacaggttcgacctaaccagcttatgtcctctaaagcaaagcacagacaccgagaccttcgacacaaactcaacgagtcaagcgaatacttgattaattctcacccggcaccttcttgttccactcgccggtccgggccttcttcttcttgaggccgtcctccagcacatccagagccttctcctcgtcgtcaatcagttctgcatcacaagagtagaaaatggtatgttagctaggcaacagacctatcatccgcgatgccgtcatacacaagcgtaccgatcgtcgcagcagcactccggaagtcgttgaatgcggcagcggcagtgtcaacaggcgacagtcgcttgctctccccctttgagatcgagaacaactgcaggtaagggttcttcttgtacgacaccgcaagtactccgtcctccgtgaacagcagctcgcacgggtcgttagcgagcagcgtctgggtgtcctcgctcgggatcgccacctccttgagagcgtgcgcgccatcagcagccacgatctcgaagaaacgcgcgttttggtagttcacgagcaccgccacaatgttcgtcgtggggcaaatcgccagcgacacgttcagcaagctcttcgccgccttgcggccactgtcgtcgccggcattgtccgcgtcctcgtccagcggctcaagcgagaccttcacaccaggcagcagcgtctccgatgccaggagcttgccggtcttcatctcccacagcttgagcgtgttgtccattgacgtggacaccacaagctcgggcgtgacggcgctgcacgccaccttggtcagactggcagcgtgtcccaggcagtagctttcgatgatggaggcgttcgggaacctcgagacgcgcatcttctcgtcgcgatcggccgtcagcagcagcgacgagtcgtggttcaccgccacatgggtgaccatggacgtggtgtggcccagcagcgtcttgaggtcgcggtccacgtcggggaacggcacggccacggcctcgcccgtcttctgacccacaacgacagcgtacttggtctctccactgggcagcttcacgtggcccaccgccatgcacgtggcgctgcggggcacggagcgcgaggccttgagcagcagcgtctccgccgccagatccagctcgtagtgcaccaaccggcgctcgtccacgagcagcagcagcgccagcagctcgaagccctgcggctggaacagctcaatggtcgtgatgcggttggcgggcggcgccggctgcgtggcctgcttcttcttgcccttcttggcgtcgtcctcgtcctccgcagcggccggggcctccacgacgccgtccgcgccctgcagcacctcgaaccgcagcaatttctgcgcagaagaagctcccgagggcagcacgaacaccgtcgtgttgcgcaccgtcaccacgacgccgtgcgccgccgccacaaacacacccgtcgccaccatgttgacacacgatcaggaaatggctggtgccaccaccaggagcaccaggatggctacattgatgtgcatatggtgtgtaccacaccctcctttatccatcaaaggcgtcgaccgcacattcagatcggaacccaagcagacttggacgcgcatcatgatgctcgccaagaggtacagtatccgcaacactgccatggctgtagtgtattattctctagtacatctcacgccacctctctaatgtgcgatatgactacaggttgcatcgtgcggcggccacgcgctcgctgctggctgcgcgctccttcagctcgttccggacgcactcgtgcggcgagctgcggcaggagccccacgagggccagcgcgtgacgctgagcggctgggtggacgccatccgccccttcggccccatctcgttcctgtcgctgcgcgaccgtcacggcgtcacgcagctcgtgctggagaaggacttcctgcaggccgccggtgggtctcggagctgctgcaatactgtaagcaggggctgtgagaatttaatagctttgagtgtgtgtgcaattgcagatgacgttgtgagcaagattcgtcccgagtcggtggtgcaggcgtcgggcgtcgtgcgcgcgcggccggccaacatgcgcaacgacaagatggcgacaggcgccgtggaggtggtcgtggacgagatcgccgagctcaactcgtgcgtgaacctgcccatccaagtggccacgggctcggaggtggccaacgaggacacgagactgcgccaccgatatctggacctgcgtcgccctgccctgcagcagaacctggtggtgcgctcgaagatctcgctggcggcgcgcaacttcctgtgctcggaagggttcctggagattgagacgcccacgctgttcaagagcacgcctgaaggtgcgcgcgagttcctggtgcctacgcgcaacgagggccagttctacgcgctgacgcagagtccgcagcagtacaaacagttgctgatggtgggcggcctggacaggtacttccagctcgcgaggtgctaccgtgacgaaggcggccgtgctgaccgccagccagagttcacgcagatcgatctggagatgtcgtttgttacccgcgaggacgtcatggggctgatggagcgtctggtgaaggagatctggaaggccgctgacaaggagctgcccgaccgaccgttcatccgcatggcattcgacgaggcgatgcaccgctttggcgtggacaagccggacacgcgctatggtatcgagttgaaggacgtggacgacctgctccaagagactgagtttgtgccgttcaagactgccttggccatcaaaccccccaagattcacagcaagcgtggcgtggttcgcgctatcaatgccaagtctctggccagcggcggcttctcgcggaaggacatcgacgagctggagaaggtggccaagcgcgcgtcgaagacagcgggcgcgttcgtggtgaaggtggaagccggcaagcagtggaaatcctcactagcgaagaagctgtccgcagcagagatcgaccagctcaacgagcgtcttgacgcagaagaaggtgacgttctcatcttctcagctggctcgtaccacgacgtgaacacgctgctcggacgcctgcgtacgcacacatcgcagttgctgcacgcgaagggttttttgcagaaggagcttgacccgaacaacttccaccacttgtgggtgatcgacttccccatgttcgagcgcagcgaagatgacgacggcaacatcctcgagagtggcgacaagatctctctctccgcgacgcaccacccgttcacggcccctcgcgctgaccacgctgtgcttctggacgagattctggcgagcgttgaggctgcagcaacaagtagcgagaagaagagtttgctggaagacccggaggtcgccgagaagctgctggagatcaccgcgcagcactacgatatcgtgtgcaacggttgggagctgggtggtggctccattcgtattcaccaggccaagctgcagcaagctgtctttgaggacgtgctcgagctgccgacgctgcagcgccagagcttcgagcacttgctgcaggccctcagccacggagctccaccccacggcggcatcgcgctcggcctggaccgcctcgttgccatcctgtgtggagccccgagcctgcgcgacgttatcgcgttcccgaagtcgtccaccggcaacgagctcatgacgaacgcaccgggcccagtgctgcccgagcagcttgaggagtaccatatccaggtgcgccacgaggaagagtagacagcgagatagattggctttttgtatccaggtagaccagaacaacgcaatagacttgaggtatacttgctttatcaacgacgatgtcgagcccaggtgtgctgtaaagcacttcaactacagtacaatgaagcgcttgtttgtctatatgtcactaaacgttaaacaacagggcaaactacggcagcggctgcttgcgctcacgctcgtactcggtgtagttgccatcgaagaactcgacgtggccgttgccctcgaaggcgatgatgtgcgagcagatgcggtccaagaaccatcggtcgtgggaaatcaccatcgagacgccgtcaaagtcgctgagcgcagcctcgagcgagcgcagcgtgtcgacatccaggtcgttcgtaggctcatcgagcatcaccacgttgtggccgcccagcagcattttggccaggtggacgcggttgcgctctccgccactgaggctgcccaccttcttctcctgcatgccgccgcgcaggttgaagctggcgatgtacgcgcgcgtgttgatgcggtcgcctccgatctccacgaactcgttgtcgcccgagatctcctcgtacacagtccgccggccgctcagttcatcgcggctctggctcacgaagccgaggctcacagtcttgcccagctccacgtcaccctcgtcaggctcctcgatgcccgcgatgatgttaaacagcgtactcttgcccattccgttgcctcccacgatgcccacaatggcgtgcggagggatctcaaaggacagcttgtcgaacaggacgcggccgtcgtccagctgcttccgcaggttggtgaccttgatgaccttgttgccgaggcggacaccggacggcacgacgatctgtccctcctcgacgcgcgaggacgcgcggaagccgctcgactccatctcctgcagcttcttgagacgcgccttgttggccttcttgctgccctggtggtcgcgcgaccacgcgatctcggacgcgatctgcttagcgcggatggcgtcgctcttgcgctgcatgttgaggcggttgcggcgctgtgtgagccactccgtgtagttgccctcgtacgcgtacgtctcgcctcggtccagctcgagcacccagcccgccacgttgtccaggaagtagcggtcgtgcgtgatggacagcaccgtgccgcggtacttctgcaaaaagtcctccagccagtgcaccgactcggcgtccaagtggttcgtgggctcgtccagcagcagcatgtcgggcttctccagcaacaaccggcacagcgccacacgacggcgctctccaccggacagcacctccacgtccgcgtccgcagcgggcaccctcagggccgccatggccttctccacctcgtggctcaagtcccagcagcccaaggtctcgatctggtcctgcagcttggcctgctcctccagcagcgcgtcgaagtcagcgtcgggctcgcccatggccatcgacacctcgtcgaacttggccaacagcgtctggctctccctcaggccgtccatgatgttctcgtacacgttcttgctcgggtccagctgcggctcctgcggcaggtagcccaccttgaagccgtccttgacccagcgctcgccgtcgaagtccgagcgcacgcccgcaatgaccttgagcagcgtggacttgccgctgccgttggggcccagcacgccgatcttggcgccgcgcaggaagcccaagctcacgcgctcgaagagcttcttgccgcccgggatggtcacgcccacgtccctcaagtggcacacgaagtccccgggcacgccgccgccggcgttggagccgcccgacggagctgcaaacgagcgcacggcattgccgccgacttgggaggctgccagccaatgcggggccagcggcgagctgcgtaggccgcgcgacgccacggagcgcgaagcgacacggccggacagcatgctaatgcccggcttgagtggatgtgcgggcaagagcgcaggagcgctttaactcgtttatatcggtttacaaggggttataacgtcaatttcggtgaccattttaccgcttgtgagagcttccactccaattccatacagcaagtgcaagcaaccaggccccagcgctgtagtctgtgaatgctaccaaattcctagctctgccagtagtacccgtttcgtcattttgaaagtgatggtgtttggcatggcaaagagtgcaacatgggaagcagacgaacgaaagacccaaacctgcagctactgaatgcaatttgctgtcgaggaaaacctgtgcaagcattccgattcagtgaagttaaagctacattgccgtatcaacgatggtgacgaagttaaagtaccttgcaccatagttacgaggaactcaggtgatgctgatagtatcgaagtgcatgctcaactccacgtagatgtatgcattggaccctttgcctttgctcaccttggaaacgcactcagttctgactcaggcatagtacagtagaatgccaccgcactcatcttgagtaagtgtaatgcaaaacctccagcgatagcggacctcggtgatcgactcggtcccgtcacgaattgcgaagatgctccgttgtcgcctccgatgacgtgaagcgtacactgcaaggctgtgtagaccttgcagctctcctgcaacttgcaacagtggtgttaaaccggagtgcgttgaggcaatctcgatggcgtggttgcaccccgcgaaagctgatccagagtcacgtgatccgtcgtgatgtccaccacacagcgctttgcttcaacctccgccgtttgtgtcattcctgcattgacttcacttggcccccatgtggccgctctcgctcttgtcccgtgcgtctcgctgcctgtcgcgctcatcggtgctgactgccagtcacccgcgcaccttctcgtccgcgtccagccgcctcaacctggcggtggtgggcacgggccgcatgggccgcatccgcctcgcgggcatgcagaacgacccgcgcgtctccatcgctgcagtcatcgactccaatgcctcggccgagcagctgcaggagctcagcagccagtacggaacgcagtgcttctcgatcatcgcggaggctggcgccgctctgagcgatccggtggacggcgtgtggatctccacacccacccccacgcacctggagctcgtccgtgacgttgcaacggggaaactcggcacagacgtcaaagccattggcatcgagaagcccgtcgctgctctcgtggacgagatcgacgcggcgtaccaagtgtgtcacaagaacgacgtgaagctcttctgctccttccagcgcaggttcgacccgagctacgaggctctgcgcgcgcagtgcgtggacaagcagagcatcggcaagctgcagtccatccacacggtcttccgagaccacccgtgtccacccgtggagttccttaagaccggcggagacccgttccacgacctcgccgtgcacgacatcgactacgtgtgcgacctcgtcggagagtatccggacaaagtgtacgcgcatgggaccagcctctccgcggagctgagggagctcaacgtcatggacaaggccagcgtctggctcgagttccccaagacgggcgtggtgtgtaccctggatctgagtcggagcgccgagtacggctacgaccagcgcattgaagtggcgggtgagcacggcatgctgcaggtgcagaacccaagcaagacggccacggtgcagtcgacaaaggccggcaccacgtccgacgtgctgctccactccttcccggagcgcttccgcgaggcgtatctgctggagctcgacagcttcatcgacgtcgtgcagggcaacggcaacccgcgcgtgcactggggcgcttcccgcatgaacaccatcatcgccgaggccgctcgcatcgccgcggtggagaagaaggtcgtcacgatcaaatatctcggcaccaagcagacagcgcccagatccgaccccattcttgagtacgaatacgaatattagagtggcgcgctcaatacaggtagactcggacgaattgatagtcggcttggatacagttgaagtttgatcataaacccaaagctcctaggcgacctctgcccgaccactcatcgatcgtgtttgacgtggcgtcggggatcatccctcactcccgaactctccagcttcgcactaccaacaatggcgtcgcaagaaccgcagatccaccgcgccctgcgtgccgatgtccacgagatctcggccatgatccaagagctcgccgactttgagaaggagtcggcctcgaacaaggccacgcccgaaaagttactggagaccgtcaacttcgccgacgacgtggcgcccgagcacattccaggcttccctctcactgccgctccgagccgcaaggtggcgcattgcttcgtcttgaccatcggggacaaggtcgcgggtatggcgctcttctactacaactatagcacgtggctggcctctcccggcgtgtacctcgaagatctctacgtgcgaccagagttccgtcgccgaggactggccacgctcctgttcggggcgttggccgaggaaactcaacgcatcagcaatggccaagggcgactcgagtgggcgtgtctgcgctggaacgaaggtgctctcaagttctacgagcgcatcggcggctctcgcatggaagaatgggtcagcatccgcgtcgccgggggcgagaagttggagcgcctgaaacaactggcagacgaggttcgagccagcagcggcaagtaacgcaacgcagagagaagcgtctcgagtactcgccccaacaatgcgaccttttgctgagcttcccgccagcagttgggctccaattttgcaacaaattctcatagctgcgcatcttacacacttaacaacagtttacgtcagtactagcacaacatcaaaacttcccattccatcgccttgaggtactggctattgagggcgacgcaggtgtgtcgtcgtctcggcgaactcttcctcttgaacgcgcaggaagaagacgaacacgaggaagagcagcacgtagaagacgcactgcagcgacgcccagttgactcgacaccacaatcgcccctgcctcagtcgccgtcgcagctccgccgtccgagtcctcacacaccgacgacatccagccacgccgcgtatcctgccgcaatttttgcaatacaatctcagctctgaaactgcctgcaacctctatcaatcacagcacgcacctccacagtcccagggcctctatccatcgagatccattgggttgtcctcgacgtggctgctgctcctccccatgtatcaatgccgcctcgctattgtcactttctgccgtgcttggtacggaaatttgcacttccgacgcggaattccgcgccgacgcagccactttcctctccacagcatcgacgaagctcgtggcttcgtgcgcgtcggctgtagacgaccgtggcgagctcgcagccagtgcggccagcgcctcctcgagcgctcggttcggagtcacggagaacggcccggagagcagcggggagcggcacattggacacgcgtccacctgacgcagcgccccatccagacacgagcggcagaagctctggccgcagcaggaggcgagcacgggccgctcgaagctgcccaagcagatcgggcagtgccagccgtcgctggacgacatttcaggagaggaaaaatgacgttctggtccaaattattgatttgggaacgctatttttggacacaacttcaactttgaggggatcagattgggaggtgcagtttctgaagtggttttgcgactggccagagttgcgagtcaagagcaaggacaggtatttcttggcgagcggtcgccatagcgtggtcccagtactagaaaacggctgcgatggttctctcttagtactcccctgcaaaattttggagtgataagtgccatctacataggaccgacccgacctccttgcactatagaggccgtgctcgaacgctggtgttggtgatcggtagagcccaagactaaaactctcgttggtgtggccctatcgttgactcttttgagcttgcgccttatcatatcaacaggagcgatgtgaagcagtatccgttgcgagccgttggatgggatcgagttgctttgagtccatcgtgttataggtcgaatcaagtgaaatgagtgcgaaactcgaatctgtctgaggtggtgctccagctattgctggcccaacgtttccgatgagcgcgtacgtgagggcgtttcagatgaggtcgcccaggagtctgttgtgtggctgcgcgatgaacatgcaacacattaaacaggaatttacacgtcttcgtcggttgaattcactggaggttgattgattcaatgctgagggtcggcttgcaccgccgcaatagtaaaacatatccactacgatacttgccgatccgtcatatacaagcccttggctcgcgtgcatttttcttcgtcgccccgatcaaaatattgccgctgcaggcagcaagccgccattgacgaaacgagcgtgtctttgctgcaggcttcaacttgcgacgaatagctgggcaggctgttcgtgaaatagctgaccttgtcagtatatagatagcagctatctatataatactcgggcgtacgttcccaagaatcgccggtaagactctgcgatgtgctctcgtccactgcgcgtcttacgccaacgccaacgtcaatggcgcttgcctacgcaccgcagcgagcagtcgactagagaaacagtagacgagtgacactatcttcgattggttaacacgtacagcagggaattcatcatcgtaaagcgtttcaatcaaaaaagggagcacgaaagcagagccagatcagagcgaccccaacaatagccggcgaatggaggcgagtatagcgtgctgcgcggcgcagcctgcgcctggtccgtctccggtggttcgttatcgatgcggtctgcagcatcgcgagagaaacaacgctggtcaatcttcccacgtactctcggtcaattcacttttcaactttcgtcaccagggcaagaagcaccgggaccagaccgtcgagtaccgagagcatttcgccggtccgctagcccagtccaaccacaaccaccttcattcagtgtctaacatggcggcgctcacggatctcctgtgccaaggtatgtagattggcgaaaccttgaggcggggcagtaacgagggcatacatgtacctcgctctcggttcctctatgtgtgaccacgtcactgcgcatttcggaggtgtatcacatctgatttcgtgtccagcactgtgctggcacaagaggagctgggatatgagatgtcacgcttgcttcgtgtttccgcctggcctaggctacttgttactacgtgcttacctgcctgcattgctgaccctcgccattcatgtgacgcatttccagtaagctcgatgcgggcgagcagtgggagctcgctggtctctgcagcgccaatcctcgacagcgagcggggcaaatacatcgcatcggcgccggcgcggacgcactcgcggcgctgcggcttccctgagtgccagaagacagccaagcgcggcggactctgcatctcgcacggcggcggcaagaagtgttcggtggagggctgcaccaccagcgtcgtgagccgtggcttctgtgtcgcccacggcggcggcaagcggtgccaggcgccggcctgcaccaagagcgcgcagaccggagggttctgctggatccacggcggcggcaagaagtgcggctaccaggactgcaagaagcgcgcgcagagcggtggtgcctgcatctcccatggtacgtacgatgtggcctactagagctggtgcagttgacaacggggactaaccggtcacattttgatcttgtgcaggtggaggcaaacgctgccggattgaaggttgcaacaaggtggtgcagtacgacgggctctgcgtcggccacggaggctatcgcaagtgtctgtccatcaactgcgacaagcgtgcgctcgccaacagctactgccaggctcacggcggcaactcgatgtgccgcgtcgtcggctgccacaagcgagcgattcgcggcggcatttgctccgagcacaaagctcagatgccacttcaggcggcccgatccatcaccacgttcgcgcgctgcagaccctcgctcgaccaggacccgcagttcaaggtcgagcccactgcagtgcttcgcactcgtctagatcagtatcacaggagcccgactgttgtcagcaaggcgacttccgagctccgggggccctcgacctacagccgcatgcggctcgcaatggacacggactcgccggctgccgacgagcacgtcctgtcccctctccagtacgtccgacaagggtccccctctctgttggacgacgggaggacgatggtgacccccatctccagacacttcaacgccggagaacggtacgacccgtttggaatgaaacgccagaacctcccggtactgccgagcttccagacgctgcagcgaagtgctagctgtggctcgtcctcggggtccgacatggaggtgtccagctccggatcaacgcccaaccagccgaatgaggacatcgtggaccagcagtggacgcagttcccagcagaaacgctgtctaggcccagcgatatggtggtgtcactgggcaaggcttgcactcacacgtgcagcgtggcgtcctgctcgcggcacgccaagaggaacgggctgtgcctactgcacaacatcgtcgtcgcggtacccaagtagtaaattagtcgaatctgttgtcatcctagttaagaacacgtattcaaaatgcataagtacctcccaagagtcatttttcagtcgtacgctctagcatgcagcattggcagacactctggatcttttgggggtaaactccacaagtcggacgcaggcacagcggtggcagcgatcacagtccagcacaacaagaagcaacaaaaacgcttgggcaaggaaccaaacagcgaatcttggttagagctcacggagagaatcgacaaataaatgatgaggttgaggtggaatcagtttggtttctggacggcattgtaacaaggtataaaatgtcccgaccatctcagcgaaagctgtttgaaaccttcatcatttgggattagaacttctaggaagaataatcccacacctgatttgaaattataaatctacattgcaggctatttacaaaactttggcctcacggacagcaggcaatttaggaaccgtctaaaacctatttttagttttagaactcacaaaaccaaacaggaaccatgacatgcacagtaccccaaagcgctgactacaactcaatacttagttggcattactgcttcgtgcactgtacatacatctaccggctggctacagaagaaacaaaaaaggttataagcttaattgcaccgtacgaccagccaagattagccaccctaaaaacaccaatacttaagtgagttgcaatgcggtgccttgcttttggaaataccgcaacaattcaatcccatattcaaatttcaacggcctgaagcgcagcgttcgctcagactgttagcttcaccatggtaatagcgtaagttaaactgcaaatttaggggcgcctaccgccgggttgtattctacttctccggtctggaaaagattgaagtgttctttattcagtttatagataacgtgttactgctccaacacagcttgaggagcccatagagtaaagatcccaaatcgctgtagttttcaaaatggttttcccgctttttaaggttgttatcggacgctttaatggggtctggtcgtaaaaactgatcagattcgagcttggacatactcttgcgaaagcgggaagtaatggtaaggtgaaagacgataactggggtcataatggaacacaaggacaagcaatacacgcgaacgaagatagattgaaatctgaaattacattgactacggcccaatagccccaacatcaagcagtagttaactttagtaattttcgtgcaacgaacagaagataaaatgcaaggtttatgttttaactttttttaaaaatgacgatgtattatatatattgaattaatacatggtaacttacttttaagttttaaaaaatgtacatgtactctaaccacctagccgatcaaaagacaagcaattcgatacgatctagatctgctaaatgctaccgcaatggccgtaggctatggtgtctgcatccagtttgcatgcgaaaacatataattgcgttttcgtatcgtttactccagtgactgtcacgattttccttcgtcggggtcgtgcccttgctaggccgaggttggaagaatagataaactcaagaaaagactaagagaagagtaaagtagtttgttgctgttgttgcttatgaagaaaaatcacgactgactcgcacggccgacggctcagctcccatagtatccagtggaacgcaactgcacggggtccacagtggcatcgacctaccgtatcctggcctctttggtgtgcgtttcacccggaacgcatgaggtgactcacgagtagttgcactctgtctatccagcgcacgcattgtgttcaaacactccaggagtagtgttagaccgtcgactgggggagaaccgtaacatgacgggaaacaatttagtaaagattcaacaccgaaattatcatcaaggtcccctactggaccaattgtaacgagctgcacacaacaacagtttgtttgacgtgctttaaattgcggggagggtttgtagcggtttagtcagcaatatacacgcatagttgcatctccgccttccgcggtcatatcgcgcagtaggctgcccctaaatttgcagtttaacttacgctattaccatggtgaagctaacagtctgagcgaacgctgcgcttcaggccgttgaaatttgaatatgggattgaattgttgcggtatttccaaaagcaaggcaccgcattgcaactcacttaagtattggtgtttttagggtggctaatcttggctggtcgtacggtgcaattaagcttataaccttttttgtttcttctgtagccagccggtagatgtatgtacagtgcacgaagcagtaatgccaactaagtattgagttgtagtcagcgctttggggtactgtgcatgtcatggttcctgtttggttttgtgagttctaaaactaaaaataggttttagacggttcctaaattgcctgctgtccgtgaggccaaagttttgtaaatagcctgcaatgtagatttataatttcaaatcaggtgtgggattattcttcctagaagttctaatcccaaatgatgaaggtttcaaacagctttcgctgagatggtcgggacattttataccttgttacaatgccgtccagaaaccaaactgattccacctcaacctcatcatttatttgtcgattctctccgtgagctctaaccaagattcgctgtttggttccttgcccaagcgtttttgttgcttcttgttgtgctggactgtgatcgctgccaccgctgtgcctgcgtccgacttgtggagtttacccccaaaagatccagagtgtctgccaatgctgcatgctagagcgtacgactgaaaaatgactcttgggaggtacttatgcattttgaatacgtgttcttaactaggatgacaacagattcgactaatttactacttgggtaccgcgacgacgatgttgtgcagtaggcacagcccgttcctcttggcgtgccgcgagcaggacgccacgctgcacgtgtgagtgcaagccttgcccagtgacaccaccatatcgctgggcctagacagcgtttctaatagtctaaagacgcccctacaaagagttgcggaccaattgcaggcttgttgaagctatctactcgctgcggtagaaagcttacaggttccagacccttttagccggagacgggtgccataaggtactagcctggtttgcgtctcagtgcagggtgtaaggcttagctccattgagtttaatgaaagcagaagaccttcaattcttgagctttgtatttgtgtcggtttgattcttacgtacatgcatgcacactgtaaagaatgatcagaccagtattccgggcttggttgagctacttattcgctccttctggcaagctccttgagcaggtcacccgttgagagcgcctccaggtcaacagcaggcacgtccagccagtcgacggggttcttgagcacgtcgagggtcttctcctcccacgatccgggcgcaggtttgttcatgtactcccaacgcgcagtcagcgggagcgacatgaggatcgactcgacgcgagatccaggagtcagcagaccgaacttggtgccgcggtcgtacatgatgttgaactcgacgtagcggccacggcggatctgctgccactccttctgctgcttggtgaagggcatgtccttgcgcttcttgatgatcggcaggtaggcgtccagcatggagttggcgcagctgcggatcatctggaagttctcctcggacgtgtccgtgaggtcatcgaagaagaagccgccgatgccgcgtccctcctgacggtgcgggatgtggaagtactcgtcgcaggccttcttccacttggggtagatggcagggtcgcgcttgtccagctgcgtcttgtacacggcgtggaagtggcgcgcgtcctcctcgaagaggtagctgggcgtcaagtcggcgcctccgccgaaccatccgatcttcttgggcttaccgtccttgtccaggtacccggtctccacctcgaagtagcggtagttgaggtggatcgtgggcgccatggggttgtgcgggtgcatgacgaggctcacgccgcaggcgtagaagggcagctcggcgccctccttgaggtcctttcccctcgccgtcatctgcttcacagcagcaggcggcagcttgccgtggatgatggagacgcccacgccagccttctcgaagacgttgccgtcctgcaggatgcggctgcggccgccgccgccgtggccctcgcgctcccacttgtcctcgcggaacttcttgccgtctacagcctcgatgccggcgcagatctcgtcctgcacgcgcatgatcagcgcctccatgcgcttgggcagcggcgccttggtgtcgaactcgatgctgctcttgggcaccttgtcctgcgacagcggctggtacaggaactcggacgtggggatggcggcggccttgcagcggctcgactcctgctgctgcgccaggtacgacgcccccagcgcggcgggcagcacggccgcggccatccacggccgcgagggcttcagcagcgagcgaaagtgacgcatgctcgcgattacaaatctcggactgaacctgcggctgccagcaaaagtatccgcacgtaaagacacgcactgcgcacttaaccgacggtattggttttttgttaagtacgaaggcgatacgttgaagtggtgcgtggccacccgaggcgcgagcttcgggtcagagctagcgttagaccggtgatttcaggctagaaggtggagtgatgcggacttttgctagcgtggcgatgcgaccaaggactggatcgagcgcattggggttttgtgttgttttgattttgtatttgagttgatatctacagacacacgaacgactatcttcgtgctagcaagcacgctttccacaggccgaggacgccatcgctttaaggctccgactcgaccttcagccagtcgacggggtgcttgagcacctcgagggtcttgccctcccacgagtcctccttgggggagtgcatgtactcccagcgggccgtcagcgggagagacatcatgatggactcgactcgcgacccgggggtcagcaggccgaacttggtgccgcggtcgtacatgatgttgaactcaacgtagcggccacggcggatctgctgccattccttctgctcctccgtgaacggcatgtccttgcggagcttcaggattgggatgtacgcgtccagcatggagttggcgcagttgcggatgcactggaacgtctcctccgacgtgtccgtgaggtcgtcgaagaagaagccgccgatgccgcggtgctccttgcggtgcgcaatgtagaagtactcgtcgcacgccttcttcatcttggggtaccacgtcgggtcgcgcttgtcgagctgcgtcttgtagaccgtgtggaagtggcgcgcgtcctcctcgaagaggaagctcggggtcaggtcggcgcctccgccgaaccagcccaccttcttggcgttgccctgctcgtctttgccgacctcgatttcgaagtagcggtagttgaggtggatcgtgggcgccatggggttgcgcgggtgcatgacgagactgatgccgcacacgtagaacggcaggtcctttccgggcggcagctcggcgttgcgctccgtcatctgctgcgcggcggcagcaggcagcgtgccgttgatgatggacacggccacgccggccttctccatgacgttgccgtcctgcaggatgcggctgcggccgccgccgccaccctcgcgctcccacttgtcggtgcggaacttcttgccgtccacagcttcaatgccggcgcagatctcgtcctgcacgcgcaggatcacgtgctccatgcgcttgggcagcggcgcggacgtgtcgaactcgatgctgtccctgggcaccttgtcttccgacagcgggtggtacaggaattcgggcgtggtggagctggtggtggccatcttggagcgcggttgtagtcttgatgcggaggaggcgaaagcgagactgaggcgcagcctcgtggccgcacattggcgggggcgtgcagatagatggcacacatgcacgccgaggcagccaagacaagcggagcgcgagcgcagcgagaaacgcagcgaggcaatcgtgcagagcagggctgcgacttgcacagtgcaagcagtgcgacttgcacttcacggtggatatgttgcccttttggcgctgcacaagtcgcagatatcgatttcgaagagtgtgacgtggtccactgggcgttcattttgaccagcgcagaggcgtccgccatggaaaggaggtgccagtgtttgtctgtgcgactgcagatctccggtgctcgtcgctttgggtaaggttgagatcgccgcacgatggtcgccaccacaaactaaacgcatttaacggatcctcggagctacactcttgatccaccagtacaaatgtcactatcccatgcacttgcacaaggtattgagtgacataggttttaatgacaactagtccttgacatcgatgtgatggatacacagagtataagattgtaaaagtttatacgggccagttgtcaaaactgtaagccgtcgtacagccgagttgttctgatccgcgtcatgagcatgcgtcctccgccgcagtccgagatggccgagcgcctggtgaacgcgccgcagatgcagcgcgatctgcagcgcgcgcgcgaggagaacgcgtatctgcgcgcgcagctcaagcagcagggcgcggccggcaccggcgcgctgccgtcgcgagacagcgccaagaagacgcgcgccaaagacgacgcggccgacgccgacttcgaccgggcgctggcgcggcggcaggcgcgtctggactcggccgccaccagcagcgggagactggccgccaacctggagctcaagagcgccaacgaccgcgtggcgcagctggagcggcagctcctggacgccgaggagaccatctgccacctcaaggccgagaagctcgcggcggtgcgagacgtcgagcggctcagcgcggccagagagcggcgaggtaccagcaggagagaggacaccgaggagcagcgcagactcgtgctggagctggagacgaggttggccgagcagaagcaggcccacgccctcgagcaggagcagcgcatggccgtcattagggaccaggagctggagctcaagacgctgcgcgcgcagttggaggagaagacgcagcaatacaaggagctgcggcagcgacacatcgacctgctggagctggacgaccaggtcatggtcaagcagagcgtcaccagcggccaaagtcagttcagcatctacggagaagacagcgacgaggacgaggacgccaaagcgaccaagcctaaaaaggataagactgggcgcgcgcgagcccccgctgatgcggactcaattgaccccaagtggaaagaggagctggtgcgccacccgacgccgcacttcgacctcgagtcgccggaagtcgcctacatcctgcgcgcgtggacgaagaacatcaagaagatgcgctacttgcgccgctggctcatacaggtggtgtccacgaagggcccgctgccggaagacttccccatgggcgttgagctgcctcgcctgccgccggaggtgcgagacgggttcctcacccttatactgccgctgctgcgaaagcagacccagcgagagatcctagctcactcccgtctgtacaatgacggagttcacaccgatttgcgtttccgtgttgtgccgcgtgattaacttaatcaagatcgttgctgtttgatgtcgatcaccgcagctctaggtcgcagtattcttgtgtaatctcctttatgacgcttgctagctggctttgaagacgctctatcccttcttgtgaggccaggtgcacattggcaccggcacttttcgagcggctagtatttaacgtctcccaagaccgttgggatcggagaaagagcttctgcgggtcgaacagctcgcgcgtctgcacttcaagggtgaacttctccgcttttgtctccatctgctgcacccgcgagcgagacttttggcgactcgaccacttctcccactccgctttatagccctgttcgatctgctggatctgggtcgcgtgggcttggaacagcgtctgcacttcctggatctgcgcgtacagcgctgagtaggtagtattttctattgggctgaccgtggattcaacgtcaccgccactattcatcgacagcacaagaccgttgatccacttgtagaagagagcttcgtcttctgtcatctgaacactgccatcagcagttagtacgcttgaccaccacttcacggatacagccgcaacgaacctttgcgatagtactcgcacttgatcaaccagttgtgaagttggtccagctaagaggtcgagcacgtaagctggaatcagctcgtcctggtgctcttcaggcttgttctgcatcatctcaagacgcttcaccaaccgttcgtggtagcgtgcgtaggcctccatctcattcaggtggccttgcaagcgaccaagcacgctatgcaactggtggacttgaccgtccaacggcatcacccgatcattggtgaatgtaccggaggagataacgtctgccgcaacttcagacacgctctcagcatcaacgtcaacatcctatacaacagcaatacgaactcagaccacgccagccaatatctcgggcggaacaaacaagtactgacgttggggaacggcggcaaacgcgcctgctttgaccctgtgcacctctgtaccgcagcgattccaacataaagagttcttctgttagcaaacgcagaagcaacatctaaacgctgacatccacattgcacgtacttccaaaatataccgctgctgcttctcaaagaaccgcgaaaacgcaacgagccacgcaaaggcgagcagcagaacttggcttgacggacgtgcagcatcggaataaaacgctgtacacacgaacccccactcgtaaaggtaaaacttcaccagctccatctggacggctacgtatcatatcaccatatcgttagcaattggaatggcaagtgcaactcgctcaacgccacgcaccgtgcagctttgggtctagtagaccgctctccactgcctccttactgttcaaccgctccatttcctgcatgtccacttcgaagtcggccagcatcactagtactaaatcgtgcagcagtctccacagcgcccagtattcccgctgcagcataaaataaaaccaatgtgtcaatgctcgatcaagtatctttgcactccctctggcagttcgcacctccgtcgtctgattcttcttggccttgcgcagcacatccgtcgacacatagcgcaccccaatggactccagtcccagacgcagcaagtagccgaagcgcggcgtgtgcgagccgtcggcggcagcagagctgcgcttgatcatggcacttaccttctgtcatgtcgtatgcaagaggatggtattgatgtgtgctgcacttcagattagtgaacacgggcggaacgtgcacacgagaccgaaaccgagttaacactgccatgcacggcaaccccgccggcaccaagactaagctaagccggcgcgactccattgaggtgcgacaagcaacggcaagcttcgcgagcaaaacgcgcgacggctccggcggcgccgaaccctgctagttggagccctgatttttgagtgccctgcaacttgcgccaggccctggcctggacgctatcgttccagtccacgaggcccgtccatttcggactgagtcggaggaggcaacgggaggatcgggagggctccttaatcggcctggccgacacccgcaagacaatatcagctgaccgggaaccaagtgcgagacgaaagcaagcttccaaggcctgaatcgtccagaccaggcagcggcggtggaacacgttgctgcttgccgccactgcaatgccagcgctgctggacggacgcaaattgaagaggacaggcgcgcgcgtctatgcagccagaacccgccctaaccgattcttgaagtgatcattttcgacaactttgtatgggtaaatgtatgcccgaaaagtccatacatttccccatactaatgctggaagatacgtttcacttgtatgccgtagcgtcgaccggacaccagcagctcgacccaaggacgcagccatgcagcatgcctgcgttccaatcgccatcgccgccgccatcgccacccgcaagacctccacacctatattctgccagcaccctcgccatggcctccatctcgacaagaagcagagcagagagaaagaagcgcccgccgatcttcccatgtcccgcaacggtttcgcggcggctgagcccatccccatccgctcaattgcactccgcactccggtctcagttcccaattcgccgcctccgagccacttcacccccactccaccacacaccactcgccatggcccccaccgtgcaagtttctgctgagccctcgacgtcgagcgctgccgaccgctaccaggggctggccgcctcctcccgatcccgcgcgcgggccgcgcaccgcgttcgcctgtgctaccgggacgaggcctatcgccagcgcaccgaggcgcgcaccaagtgtctcatcgcggacgcgacgtcccccacgagctccagcacgagcgtgctgctggccaagaaggcgctcaagtaccgcaaggtctacgaccgcatgacgggcgtggacgtgaacgaccccaacttcaacgtgttcgagttcctgggcgtcgactggtgcaagacaccgtccgtcgagacctcgagccacgtatgagcgacgggcaaacaccctcactatttattgtctgccgcccacgtcgctgagcgctgcgctgcgttggcggacgcaatggagtacagtagccaagcgtacatttgcgcatatatcgagatcttatcgtaaccttgaataatgcactgtactgtacatgcgcacgtatccatccctgccttgctctgtttttccaggatttgacttcaacttgaaggcacaaccttaaccatttagataatgtgctcacggtgcggcaccgtcggtgcccagcgtcctccatggagtaggcactgcccacaccacctacctggtactgcagtcgagcagctccatttgtcttgtcttccagtggaatcaattatcatcggcatcaccggccaggcgcgacttgttgttagtgttggctgcgtcttccgaatccaagattcaagtttacttttgttacgaagtttactctgcctcgatgaatcatgcgcacacaaggatttccccttttcattcgggctgcattgattcgggtggccaccgtaaaggaagaaaaattcctttggtactgggactgcgaagtatttttcttatacagtacctactcgagaccttcatacacaaaaaagtagctcgtggtgaagatttcgaatatgttgcctgcagattccatctacttactgctagtaccagctaacgcggccaccatgcaccacacaacactactttttgcggggtaaacctgtactgagtaaactgaaaaccagaaaattgcagtgtcagtttcgaggtgaaatagtcattggggaacggtcacagcccagaatggcacaagctactgcggtgagcccagcagagtccgaggatgcgtccgcgtgctacgaagcatttgttcagcgaaggcgtgcacgtggtgagctgagtattcgaacgctcgagggcttccgacgacttcaaaagagatacggccagttagcgtccaaaggtgcggcgtctgatcctgcagcaagcgacgaccaaactaaaaaggacagcgatgtggtagctaccgagcagcgtactatcgtggatgtatatttcaaccccaagatttcgagagtgattactgaaacgtgctggtgtttggcacattttggcggcggtgaggatccgaaagagcaaaaggtgagaaggtgtctgtgatgcacgatacaacaagaagtatctgaattatttgaatcgatgcttgtttataggagtgtgcaggcctgatccttggtgccgagaagtattcgacttttaactttcgttttcttcagtgggtcttcccagaactgccgcgtagagaagctcagcagctcgtgcaaagagattgggaacatgatcgcgagtttgatgagcgccaaggtgacggtggactgagtctgcatgggtttaaattatcgcttctggaccttgtcatctcctgcacagtatgtcgtcgtgtttgatcctgttcaacgacttattttgtgcctatttaacagtctagtgaatttgtaggattgtaccgtgaacaagtgtctagagttcctcaacctgatggctcgctggttgcagcactccctgcctccgtatcctacggtcgatgcgatcccacaagccgttaaagacttggtagaagccagaaagaccatcgcttccgagtccacccatgccaaatcgaccccagctcccatcgcgtgggaaaccattcctttatccatgatggctccttgtcagattggccatgaaggcctttactgcgagctaaaggtagggaaatggctgcaattgaccacagtttggttcacctcacgcaacaacttaacattttctttggtttcgattgtatctcaggcgcaagtttgttcagcaccattgactattatggttctggctgccgatgaaaagtatgtgcatgttgaggtttgttaattgaaatcgtgagcacgacagaattctgaccctcttgctgttgttgtacgacagccctatcgaactcctgctgtctaccaattccaagctacttgtcacgaaaagtagcaaccacgtagatgcttatcggaaggtcacatcagctaacgtactctgtggagaactgaaaagacaaggatattggacgttctgcatgaatccgggcacaccgctgatcctgacggtcccgaatgaaagcatcagtcgtcactcgaaagctctatacgcttactttcgcgccttcaaccctgacaagcagcaagagcctcatggtgatgtggataacaacgacagtcctcctccgcaagcaccagcttcgtcgtctgtaactctgtttacgagtacacctgagcattgtcgcgttcgctttggtagcaagggcagcgtacctcatcgtatggagcgcatgagcgctcgaatgtttacagtggatcgctccgtcacacaagaaggctcgttctcgattctagtcacggcttcgctcctacagtgcacaagcgctgcgggtggtgctggagctgcggcggctgtttccagcacatttgagaaagcgtcaaccttcatcataagagaagatcagtggacggatccccaaggaaacagcagacacacggacgctcacacgtttatcttcgttttcaagagtaccgaacccgctgaaccaacaaaaaagaccgggctgaaggagcacgaagctacacttccacaacaatggttcacgtcattgagtgctgcgaacgagaccaaaaccatcgtggttgagcgaaatcttgccgccgtctcgaaaaatagtgagcataagaacgaaggcactagtgaagcagaatctcagcgacgagacgtttatcagctcttcgtcttcacactccatggaatatttatcgaagtgtcctgcactgccgcacctgtgctaaccaaagaaccaggaagcggcgatggcgattcggcggattcagagggcagcgacgccaacgaccataacgcgttatccatgatttcagaaacgcccttgaccagcgtcgagctactgaaagagcttctactgctgcagaagatgcggcagaaccaaagcacatcggaagccttaccggatattgtcattggcactcaagtgaccacgactaaaccggttactatagcggagtcgcttcgaaccaaggtatagagattatgaaaaaggtgctagcaggtacaatactcactctctttgttgcgttcgctataggttcttcgctcgcgtcaagatgaataccacgatcgcttcgttcagctcgaagccgcaattcgcgaaaagctcgtcgagtgcaagcaacggcggccaattgcgacgccagcgcaagcctccgaaagtgtctccaacatagaagtcgcgagtccaccgtcgccaacctcagaactcgataagcgcgtgagccttttgacgacgttcttccacgagatggcagtgcaccagccgaaactcgacgagttacatggcagcgctgccgaagcagcggaggcagcggcggaagagctgctgctcaagcggttcggcgacatgttcaacacggatgaaaacctgcagagcactctggatgaggagaaatggagtacagacacggctaaagttgcgcgtcgacgcagctcaatcgctacgaatctgcccagggcgatgcaagcggaggaggtcacagggacccgagaccaaatcgacgaggggaagtacccgtggacgttcgaggactacgagaatacggcgcaatacatcgaacagctgatggtagacatcgaaacccacgagacgcagcaacaagaggtgcaagacgccgctgaagccgagcgcagacaagctgtgatggcgcagctcgtcgcctcgtggcagtatacgcagcaccgagtgaacaaggcggcaacgcgtcaacgcgtgcgtgagattgagcagaggcggcgcagtcagtggctgcagtctcagcgcgtccaggtgtacggcgctgttacgtctgcaaaacgtggtgacaggccagagcgcacagccttcgtcctacccaagcaacggttcctcgtccaagaggagtccctcccctcgactgcagtatgggaggtgcctacttcaccggctaccgaggcaacatcactggtatcaggagcactcgctgcggctggccttgtcagtcctgctagacccaggtcgcgtcgtgaagacgctcgccaccaaacttcgaccaaaatcctgccacgtcgtccacctcagcgccctatgacggtggccacaccagagcgcgcaagcaacgtcaccgcattgcggtctgctgcgctctcgcgggctcgcgtacggcgcattcgcagcgcgcactcgaattatcgaggaagttctgctcagactgcatcgtctccgacggaaacagctcagcaagaagcacaagtggcgccccaacacgggcaatcgctggtatctgacaaccatgcgccgccagcaaactcgtccaagacggctgatactcgtcgtaacgacgacaacactcagctccacgccatctcgagcattcaaaacctattagtcgcgcccccagacgacacggtagataccggcggatcaacatctctggcaaccgcgatactttccggtgaccaagcagaagttgaaaactgggtgacaactgatactgggagtattccacgagagcgaagcactgcaaggccaccagcacggaaaaagaagctcaagaagaagcagcgctcagccagtatcgtgcgcttccaacgtcgagttcaggagctggtatcgatttcagctcaactgcaagctgccgccgagcaagaacggaggcaggctcaaggtgtcgatgaactcagtagtgtaccattcctggcaactcgcagcacaaaaccagtgtctaataaataacgctgcgcgtcttgcccacgttctcgcgaccattccagattgcagtttagattgtccagcagacgacttgacttgaactccccgcaagttgggctccgacttcataaagtgcctcctgctgcgcgttcgagtatcggcacagcaatggaagtggatccgcttggcggttggaagctgcagctttcgcccgttgatgctcgaatgcttcgctttgtactgcaggctttgttcgtgttccctccgccaccgttgaacgctgccccgtacgaccccaagaagcttcgtcagtcaattgaccagctccttgaggaagatttccccttcttcaaagacgctcaacgcgttcgcgacggggaaagtggtgagttttggcttcattctcgacatggagcacaagtgaaccaacttatcgaggtccaggagcttccagaattgaccaggatggacgaagtactcgagaccacccctctccacttcatcccagcaagatccgagacccaagttctctctgtcaagtgctgtcagcttatcgacggtactctagtcattggagtggatgcagatcattgtgtcgtggacgccgaaggactcgctctctttatgaagcgatggagctgccactactacggcgtaacaacagcagactccacctctgtctgccttagtcatggccgtagccaactgattccactaagtccatactcgtcgacgatgactcatccagagtgcgcatgcgtctgccacgcttcaactcaaagcccacacccaatgccaccaagactctcaacctttacaaccagccagcagcgcctccacctgtcgcccacagagctaaagaacctgaagacttttgcttctctcggcgacgagacctcaccgatcagcacactcgactgtgcgagtgctctcttgacgtggctgatcacgcgcagcagaggacacagcgacgccgtccaagtctccaccgcagtcaaccttcgacgccgaatgcagccgccactaccgcgtaatttcacgggcaacgttgtgctcccagcgctgtcacgccacccagcccaagacttccaagcctcaagctcaggcccaagtgccagcagtttgcactccatcgctcgacgcgttcgtgaatccatcgccagattcgacgacgagtacatccgcgacacagtctcgctgctagcagctcacccagacccagatgctctccagcctgcgctgcgtctcccaggcggcccggatctcctcttctcgtcctggcgaggcctcggcctgagagacgtcaacttcggctcgagaccgacgtacgtcggcccgccgacgctcgtcaatcccatcgatggagtcgtcgtcttcctcgaatcagtcgacaaccggccaggactcgacgctctcgtgttcctggagcaccaggccatgcactagctgctcgagctgtggcaacaacgcgtgaacttgccgcgtttgcgcatacgccgccacgattcgacttgactccctctcagttgctaaaaagataccgaacatgggcaagatcgaggagcgtttggccgagctcggctacgagctgcccgccgcgggtgcgcccaagggcaactacgtcaacgtggtgcgcacgggcgactacatctacaccggtgcgtgccatacacaagctctcgttatcctatcagctctgacggtgtgtcattcgtgtcaatagctggccacctgcccgtgacggctgcgggcgagctcatcactggcaaactgggcaaggacctgaccacggaggagggatacgccgcggcgcagcgcgttgcgttggctctgctggccacgctcaagagtacgtggctggaaggcagtccagtgatggatgtgttatttactggagaccgtggctgactggacattgccgttgttgttgctactgctaccagaggagctgggcgagctgggccacatcaagcgcgtggtgaagctcacgggcttcgtcaactgcgtggacacgttcacggcccagccgggcgtgatcaacggcgcgtcggacgccgtggccgccatcttcggcgacaaggggaagcacgcgcgctcggcggtgggcaccaacgccctgccgctcaacgtggcggtggagatcgaggccgtcgtggaggtggaggccggcgcgccctcgctcacgtgagcgatgctgtagctgcagatgacatgagagtaaggctcccctcccttgcatcaagactgcagggcagggcagcggaataataatcccagcgtgtgaccacatagtacactgtacttgccatcggaggcttggcaacggttgtcattgccaccacgacaacgtgctcaagcaggataaaacccctcaagatatgctcgcaaggcccggtctcactaaaatttttttacacaggtctccacatactaaaaccaagaagtcgagagtcagcaaaagcattcggatcataaactctcacaagcactcgtgagttgctctgcagtaaagctcacgcagcatccaaatggctcccgccgcagtgacgccgcagctctgacgccgcatcgagtctcagcttggtccatttccccgctgtctctcgatctccaagtccatggtttcgaccgagtcctcggcggcttcaacggcaacagtctcctccactctgcgatggcgggcagttcagggcaaagacgcccctgataccttggcgttcggcactgcagatgaagaggaagagatccgcacgaaactcgaccgcagccacgccgcagacgacgagaagtgcaggttgttgctgcccgaagctccgcagctcactctggagtggagggacttggccctccgcgtccccgttgccaatgagccgggcgcgatggacaaggtcattctgcacgacgccaatggcgtcgcccgacccggggagctgctggccatcatggggccgtcgggcgctggcaagagctcgctgctggactgtttgtccgggaggaatggcaatgctgaaggccgcatcatgatcaatggggtggaagggtggacacccaagcgccgcagaatggtggcgtacgccatgcaggacgagttgttccatgccacgctaacggtgcgggagcatttggtgttccaggcgaggctgaggctcggtggacaggtgagcaagaaggggtgcctggatcgagcgaatgcggtcatcgaggagctggggctcacgggctgcagggacacgctgatcggagggtggatgctgcgcggcatctccggcggcgagaggaagcggctggcgttcgcgtcggagattctgacgaacccggcggtgctgtttgtggacgagccgacgtcgggactcgatagctgcatggcgcgtgctgtggtggagcagttgatgcagctcgcgaccaagcgcacagtcgtgactgcgatccaccagccgtcctcggaggtgtttgctctctttgatcggctatatctgcttgcggagggcgcgacggtgtttgaggggcctccgtgtgaagccatttcgcatttcgcttcgctgggacttccatgcccgcagtttatgaatcctgcagaccatttcatggagcagcttgtggtgctggagcgagcgacggaccacgaaggattggcccgggtccagcgcctgaaggatacgtgggctgagcaacagcaaaagcatcaagctcaacagccgagcggtggcaacgcggctacatctacgtgggcgataaagcaggcccttccatcgacagacgcagttgatgttgtagtctacgaagtggaaggacgcgaggagaatgacgttgaaggtcccgagtacgactacgagagcgcgcatctaccgctttggggccagattgaagttctcgcacatcgtaatgcgctccgactggcgcgagaccccatggccttccgtctgcaggtgctgcagacgttcatcttcgcgttcctgctggggctcatctacttccagctccagatagatcagaagggcatccgcaacttctcaggcgccttcttctacatcgtgacggaccaagtgtactccgcttcgatgcctgctatcatctctgtgcccgtggagctccctatcgtctaccgcgagctggacgtgggtctgtaccgtatcggcgcgtggttcctcgccaagaacctctgtgagttgccgtcacaattggcgctgcccacgctcaacctcgtcccgatctacgtgctgatcttcggcttcttcggcagtccaggcttctgggtgttcatgcagatgctggtactactggtagcgatgaacagctcgtgcgtggcattcggttacgctgtctcgtgtatctgccgtcgcgtggacatcgcccccattgtgggcaacatcgtcatcatgcccctacttctgcttggaggcatgtttgtagacccggagcgagtccccgccatgttccgctggctggagctcgtgacccccttcaagtacggctacttcggcttcatgcgcgcgttctggcgcaacgtcgccaacatcccatgcaatctacaagacgcaacagcagactgcaccccgatgacaggacacgacgtgctacaggactacaacatccccgaccagtccgtctggggcgacgtgtggagtttaattggcctgagtctgtttttccgagcactcggcttcatcgccctgcacttcagccttcgccacaagttgagctagtgtaccactaaaaattaaaaaagtaaatctttggacaacttaaatcgcgtgcgggggggggggggggcaatttgatccaaactccgaactaccggtacccctctttttttcgagaaacttcaagtacaccacgttaaccagaaatctatgatggattgcttgccgcgccatgtgatcggttgtcgttgccgcaggtggaatcaaggatttggtacaagtctctgcacgatcgactaaagcttagggaatgcggggttagcacatggatattatgggcgtggattctcgacgatcttaaacgaagtaccatagaatgcaatcgctgttgcggtattgagctgctgtatcgacgagttcaaggtgtgttgcagtgttccggaatccaacagacccttatttactgtgattaacctcaacttagggcgccaacggcctgtcgagcacagatacatgtagcaagcccccgaaacgcgcggcagtcctcggtgtgctcgatggactgcaagccttatcgaagggacgactcaggctcaccggcaaaacgagcccattttttagaacggtctaaatctagaaaggagacttgcaaaaatggtagttaccgacactgttgatgtggccccgccactgcctgctactgccctggatcttgctaggtagttccgagctttatctggggaaaccgatgacaacagcgcctctggttgagcgcggaaaaatagatttttagtgccgaacaaacatattcaaacagccctgatcgcaaggcatacaaaacagaagtagcgccggggctgggtcgtgtggagtgggtgtcaacataaatgttacacaatggggttcgtaatacaaacacagtaatatctgccccgtttctagaatttgaatgttctaaaaagtgggcctaatctgccggtgagccacgactcacgcatctgtactgtacatgcaagcacctgtcaacctcgaatccagtttgtttgcagactgtcaatctctgctctaacgtgcgacgtgttgccacatgctaaggctcgccaaaagcagggacagtcagtcgatcagcgggaaagatcatgcctattccgccaacgacatcgttagaaaaagttggcagcacgcggaaagtaaactgttccactcgagcgcttgtggtttccaatctacagatggctgcttcaactcgtccttacacagaacatcaccacaacttccgccccagcgatcctacgcattgctcccgatcccgaacggactcccccattgtgtaccgcatcgcgatcacccgttcattcaatggcgagtggcgagcaagctcttctttcattcctcaacttgccctcaacgcaacactcgcctcgccctcttcgactccgatccgactgcgttcctacaccatgaagttcatcgcctccatctccgccatcatcgctgcctgcgctctggccgtctccgccgatgtagccacgggccccgtgtggggctaccacgccaacgacgccagcatggtgcacacgtccaagtgggccgagcactggaaggcgtgcggtggagtgcgccagtcgcccatcgacatcaagactgtggcgaaggtggacaacggcaagaagagcccgctccgattcagtggccgctgctcgcattacaacctgacggagccgcacgagccgctcgaggtggacgtcatcggaggtgcgtgtttcgtgggagtagccattgcactgtgaagggtgtagctgatactgaaaggttttgttaaaatgctctacaggcaactgcattgctgcggtgaacgaggccgagtacaagatggcgcagttccacctgcacgccccgtcggagcacaccgtaaatggcaaggcccacgacggggagatccacttcgtacacaagagccacaaaggctccgctctgttggtggtcggtatcttcctggacatcgctcccaagtcggacgtttggctgggaccagttcttgacgccctcgagaacgtcaactcgaccgcgcacaagaaaaacgaggctatcaccgttcagttgtaagtacaacagaggactgcgctgggtccagtatttcgcttgtacagctccactcactatttcgtttccggttgtataggaggtcgtactcgaacctgatcaagaaggcgagcaagaactgcggcatctacaactacccgggcagcctcacgacccctggctgtgatgagactgtggactggtgggtggtgcagaacgcgatccagatctcgtctgccgacttcaaccgtcttcacaaggatttggtggagtaccacatcacggacgacggcaacaacgctcgccccgtgcatcctctgaacggccgcacggtgacgcgctacaactagctggtttgatgcagcttcttaattgaaacgatgatgaagcttcctttgctctgatgtcgctaatgttgtgtacatgtactgccctaatatcacaatcgagacgcttaatataactgttgttttgtatgtttctgactgtaagcgttatactctcttttcatgtagcttcgtactgacaacgaaaatgatacgcaaacttgcgaccgtatttcaatcagtttttagtcgccgccttgtcgatttttggtggatttcacggggttgtcttgcagtcaattccggcggaaaggtcttttcagaaatctgctacatatacatgtatgtagtacggcgaatcgcgcttgctcctgggtattacacagtaccattctacctttgtcattaccgtggaattctaaagaattctatttgttatattgtgacggtacacatagagcttcatcttttcgcagggagacgccgtgggtcgcggtagtccgactgcgctgccttggacaaactcttcagtcaaatatgttcatgtgctcgtacagccccggtagtacagatacgacccacaaactgcaaagagtggtacatccaagttcctacaggaaattatataatctaaggagataagtgattgaggtgcgttactaccactatttcctcaaagctcaattttacttctagagagagagggtgatactcctcaataacatcgcacttctgctggatggttagccacacacccttggtacgcttctgggtgcccttagaacgcttctggaggctgggcgtcctgtgctcagtgctgccttgagtttgtctgtggaaaaagtgcgccggcgggatgattcaaatgaaaatggaatgtgtagaccacacagtggcggtacttcaatgtgatgggcgctccctcctgagatgatgtcacttgatatcatgattccacaagggtatcaattaatacggtttgcagtttctgggtggtatctgtactccagtgaccacagcaacgcgacactggccgcttcaacttgcgacttgacgataagatatacatgtattgtgctttgcagataaaatgtcgccccgttttatggcctagatcgaggaaggccggtccacaaatcagggtacaaaacagaggcggtagctcgatttacttagatcgacctcgaattgcgcttttgaaaacgcaaaagggatcgatttaccgtagatctgcccagatccaccgggagatcgacctcgagccctgatttggattgtcgtagctcgagttattagccggcctaaatagatcgatctgtccctttctttgacctcgttttattaaatcgacctcgacttaatgataaatcgatgagagctccaagtcaaaacaacaaaacgtttgcaaagcacaatacctaaaaggcatagtatcatgttgggacttgccccctcgtatgatcactacgcgtctgtcgtcgccaactccatgcgctagtcgaaaactccacgtcacccgggacgtttccatcgatgggagcatggcgaggagctcgcgcaggcaaggaatcagccgctaataacgtagcggggatttgcgataacttggaggacgcgttctggtgatcggctcttcttcgcagatacagccgtagacttaaagagggagttgcatacatgtacccgtaaatatgtgagcgtcgtgacaagcatcgaagtcgagttgcgttcaccattattgacgcaaccgccggcctacatgtagttctcagtcccctcaggtgaacaacatggtattaaaatataccctctacagtatttccacagacctatggtgaggtgagactttggcctggcgcggacttccgaaaaaccggtcgcacagactgctgttgcgtttgatcgcttgagcaaaggagagcaccctgcctaattgacggcaaagaatctggataggctctcgagaagcacatgtcggcagcgtgtccgggttttgtattcaggctgttaatcaattgtaactcacgcgcgccatatgtgggtaagcaaaaagcgaggacgaaagcagagtgtacagtacggcgtgttcccgacacaagctattttaacttttttgaaagtactaaaatagcttaaaaacactatggtcgctaattaccttattacctcacactacaggtccagccgtatcaggttctggtacgaacaaacttaccgcacttaggctttcatttttatatgaaataactaagccctttcgtaacaagaattttacagtttagtcacgcagttaatgattcttgaacggattttgcaggacactaccaggacacagaaaattgctttatttgtccaatcaaattccacgtaccgatgagattcggccaattacattcattgcgactcttgccgtctatgcttgtcggcaacacgatgcaggcggactaccgggacccagcttagttgacctcgacggcgctttctcgcgcgggtagtgctgagagagacttcgatacttggagcgcacgctgcgtacacgctgatggcctccgacactgtctggccagctcgaagtaagtttctatctgctgcatacgtctcgatcttattcatcagataccgggcatcactgaggcgctgtttctatttggcatggccgcgccttccagaagccgaagagggggtagacgcttctcaacattcccgcagcgccatagcacccaaagatgcgcggcagagcacttaggaaaaacgaagtcaggggacccgacgaaatctcccagcccaaaagaaggtaggcagcgctgttcgcttgtcatctggatcctgctcgatgtcttgctgtacttctgacacgttgggctggctaactagatcgtgaacaccggcttcttcaaggcacttccgtagagcgtcatgaagcccgtcgaacgtgacagttccagcgccgatagcacgctcttccagctcatgaataatatccttcacaatttcgcggcgggattcctcaatcatttcgatagttgacagcgtattgtcttgcagtactctcatttggcctaaaatggatacatgaggcggaaggcccgttgctttgagctgtgttttaggcccggcgtatccacactgtacacatgagctcaaattcccgagaagctctggatcctgaaataatgccgtctcgaaaagagggtggcgaggagggaggtgcattctgatgtacggcgtgtgatacactaatgacgcgaggcaaaactctccaacaaacagtaaatgttcgggtatcccttgaaatacccttgtaacaccaagttttacccattcatcttgctccacaaaatgtggcggtagaattgcgaactcgtgactacccgatggaagaccagcaaccgttctgccgacatacatatctccagcagcctcgtagcgtaagtaggtattctgaacaccgccaagagaccacccagcacgcaaatgaaccgtggttgatgacggacaagctgtcgaccctgacgcacagtacgttgcagcacctttgcgcatcgaatgagtccccaaatcgttagaattgacccctcgtcgtttaagctctgcagcaaccttctcatccactagcaaacgttgcagacatttccgaaatcgatcatactggtccgtgagcaggggtttaatacgccgccgcaattgcttctcggagagtcccgtcacgtcgccgatacggcctgcaaatgcgtccggaatgaggttctgatggctcagaagaagccacgagatgaagcgacagtaggagttgacgtaggcagcccgtgagctcggggcgactgtattatctcgaatttgctctgcttggcgcctcagttcatcgagtccgctgggttgtgggggggatccatcgctaatcgacttatgtagtggacaagctgtcctgcaaaagaacaaaataatggctttgcttaccctcaaccactaattctgggttttgtataggatttaaagccggaaggtttcgacttgggaaatacaggactttcgttcttgcgctaattcccgtacatctgctagatgtcctgcaaattcaggagaatgttaattgtgttgacgactttgccatcgccagatggattattcccgtcgtgtccttaccacttcaacgcaagttccgacactcccgatttgctcacgatcccaaacgggatcctcgtttgcgccgcgccgcgatcgaccgatccttgatggcgaacaagcccttccgttccacaaactcgtttcattcctcaacttgccctcaacgcaacactcgcctcgccctcttcgactccgatccgactgcgttccaacaccatgaagttcatcgcctccatctccgccatcatcgctgcctgcgctctgaccgtctccgccgatgtagccacgggccccgtgtggggctaccacgccaacgacgccagcatggtgcacacgtccaagtgggcgaagcactggaaggcgtgcggtggagtgcgccagtcgcccatcgacatcaagactgtggcgaaggtggacaacggcaagaagagcccgctccgattcagtggccgctgctcgcattacaacctgacggagccgcacgagccgctcgaggtggacgtcatcggaggtgcgtgtttcgtgggagtagccattgcactgtgaagggtgtagctgatactgaaaggttttgttaaaatgctctacaggcaactgcattgctgcggtgaacgaggccgagtacaagatggcgcagttccacctgcacgccccgtcggagcacaccgtaaatggcaaggcccacgacggggagatccacttcgtacacaagagccacaaaggctccgctctgttggtggtcggtatcttcctggacatcgctcccaagtcggacgtttggctgggaccagttcttgacgccctcgagaacgtcaactcgaccgcgcacaagaaaaacgaggctatcaccgttcagttgtaagtacaacagaggactgcgctgggtccagtatttcgcttgtacagctccactcactatttcgtttccggttgtataggagatcgtactcgaacctgatcaagaaggcgagcaagaactgcggcatctacaactacccgggcagcctcacgacccctggctgtgatgagactgtggactggtgggtggtgcagaacgcgatccagatctcgtctgccgacttcaaccgtcttcacaaggatttggtggagtaccacatcacggatgacggcaacaatgctcgccccgtgcagcctctgaacggccgtaaggtcacgcgctacaactaggggtttctagttccgtccaagactctgcggagacttgatgtgatgattaagtctctacttctcatacatcgccacacgtgatacattgactccttataaagaacagaacatgctttattcgactgttgtcttctttgcgaagtgtacgtgtaaattttgttgtcaccttggaattctcgaggattcttttttttctgttgtgtaccgagcctaatctcatcgcaaggagacgccgcgggccgcggcagtccgactgcgctaccttggacaaacgcgtcagtcaaatatgtccatgcacaacaccggaagcgctctattattaaataggccaccgcaacgggccgcttcaacttgcgatttgacgacaagatatatcatgtacctaaaaggcatggtatcataacgccacttgtccccgcaaatgatcactacgcgtctgtagtcgccaactccatgcgctagtcgaaaactccacgtcacctgagccagtcgctaataacgtagcgcggatttgtgataacctgaaagactcgctctggtgatcgactgtttttagctctaataacaaatattacttcgaagtaattattttaataatatataatttaatatcaaaaaaaactttctatttacaagcttgaatgctgctacgccgaggtagccacggtagcatgttacatgtatcagcaatgctgagggtatatattgaggaaacgttagcgtttgcatgtcacgagcagtgataaacctgtcaaattctcccgccttcaccgcgcttaacttctggtccgaaaaatagcaacgccatccttatgtggcaagtccatttttcagttagcaaaatgtttgcagtcagaatgagagaagcgctgccaccgcactcgcaacatgctgcagtgcctggacgcttccaagagtacatacaacccgtttgccatgctgtgggaggaggagaagccaccgacaacaagcactgcatctgtggcctctaggcagaaggttcgagtagctgaatttgaatttgttgcggtttagtcggctatctacacccaatgctgcgcgctgctgcagcttcgcctacgggccccggacctaaagtccagtacccgcggtagtagcccaactcgagtagctgacagagctcttgatgctattaccctactttttttaaaataggagagcgaggaacatgtgtacatcgagctggtgctataatcttatctctggcatccagtttcagcagctgatctaatgcggccatgcaggataaatagtttcttgttgttgtgaccccaaaggcaactgaagcatgtgtacatggagtcgggcgtgctgcatactacaatagggacccttaaggggttaacttgacagcgtccagaacactgagcggtaccctgaaatatttcttagtacaaaataaaaattaatctaacattcgcaaaatatcgacatacgcagacgcttctgttacaacatcgcattgcacccttccgcattcatccaacgacttgattagttcggcgcgttacattatccgttgttcggccttcacccgaagttcctcccctgcgcttatcgaaagaatcgcccctacgaacaagctgttgcaccccagtttgtatgtaggacatgctgttctgactcagcgccaccgatattcagagctataaaaacatcggatacaccagcaccacaagttccgccatacgccacaagctgcttgtttcctatcccgggtggattctacgtttgcgccgcaccgcagttgacagactcaaattcctcattcctcaacttgctctcatcgcagcacttcgcatcgccttcttcgactccgatccgactgcgttcctacaccatgaagtttctcgcttccatctccgccgtcatcgctgcctgcgctctggccgtctccgccgatgtagccacgggccccgtttggggctaccgtgccaacgacgccagcatggtgcacacgtccaagtgggcgaagcactggaaggcgtgcggaggtgttcgtcaatcgcccatcgacatcaagaccgtggcaaaatcgggcaagggcaagaagagcccgctccgattcagtggccgctgctcgcactacaacctgacggagccgcacgagccgctcgaggtggacgtcatcggaggtttgtggtgtgaatgaagcgtagctcttggattgacatgatccggctaactttaatttatcgcaattggtacaggtaactgcatggcctccgtgaacggtgcggagtacaagatggcgcagttccacctgcacgccccgtcggagcacaccgtaaatggcaaggcccacgacggggagatccacttcgtacacaagagccacaaaggctccgctctgttggtggtcggtatcttcctggacatcgctcccaagtcggacgtttggctgggaccagttcttgacgccctcgagaacgtcaactcgaccgcgcacaagaaaaacgaggctatcaccgttcagttgtaagtacaacagaggactgcgctgggtccagtatttcgcttgtacagctccactcactatttcgtttccggttgtataggagatcgtactcgaacctgatcaagaaggcgagcaagaactgcggcatcttcaactacccgggcagcctcacaacccctggctgtgatgagactgcggactggtgggtggtgcagaccccaatccaaatctcgtctgctgactttactcgtcttcacaaggatttggtggagtaccacatcacggatgacggcaacaatgctcgccccgtgcagcctctgaacggccgtaaggtcacgcgctacaactaggggtttctagttccgtccaagactctgcggagacttgatgtgatgattaagtctctacttctcatacatcgccacacgtgatacattgactccttataaagaacagaacatgctttattcgactgttgtcttctttgcgaagtgtacgtgtaaattttgttgtcaccttggaattctcgaggattcttttttttctgttgtgtaccgagcctaatctcatcgcaaggagacgccgcgggccgcggcagtccgactgcgctaccttggacaaacgcgtcagtcaaatatgtccatgcacaacaccggaagcgctctattattaaataggccaccgcaacgggccgcttcaacttgcgatttgacgacaagatatatcatgtacctaaaaggcatggtatcataacgccacttgtccccgcaaatgatcactacgcgtctgtagtcgccaactccatgcgctagtcgaaaactccacgtcacctgagccagtcgctaataacgtagcgcggatttgtgataacctgaaagactcgctctggtgatcgactgtttttagctctaataacaaatattacttcgaagtaattattttaataatatataatttaatatcaaaaaaaactttctatttacaagcttgaatgctgctacgccgaggtagccacggtagcatgttacatgtatcagcaatgctgagggtatatattgaggaaacgttagcgtttgcatgtcacgagcagtgataaacctgtcaaattctcccgccttcaccgcgcttaacttctggtccgaaaaatagcaacgccatccttatgtggcaagtccatttttcagttagcaaaatgtttgcagtcagaatgagagaagcgctgccaccgcactcgcaacatgctgcagtgcctggacgcttccaagagtacatacaacccgtttgccatgctgtgggaggaggagaagccaccgacaacaagcactgcatctgtggcctctaggcagaaggttcgagtagctgaatttgaatttgttgcggtttagtcggctatctacacccaatgctgcgcgctgctgcagcttcgcctacgggccccggacctaaagtccagtacccgcggtagtagcccaactcgagtagctgacagagctcttgatgctattaccctactttttttaaaataggagagcgaggaacatgtgtacatcgagctggtgctataatcttatctctggcatccagtttcagcagctgatctaatgcggccatgcaggataaatagtttcttgttgttgtgaccccaaaggcaactgaagcatgtgtacatggagtcgggcgtgctgcatactacaatagggacccttaaggggttaacttgacagcgtccagaacactgagcggtaccctgaaatatttcttagtacaaaataaaaattaatctaacattcgcaaaatatcgacatacgcagacgcttctgttacaacatcgcattgcacccttccgcattcatccaacgacttgattagttcggcgcgttacattatccgttgttcggccttcacccgaagttcctcccctgcgcttatcgaaagaatcgcccctacgaacaagctgttgcaccccagtttgtatgtaggacatgctgttctgactcagcgccaccgatattcagagctataaaaacatcggatacaccagcaccacaagttccgccatacgccacaagctgcttgtttcctatcccgggtggattctacgtttgcgccgcaccgcagttgacagactcaaattcctcattcctcaacttgctctcatcgcagcacttcgcatcgccttcttcgactccgatccgactgcgttcctacaccatgaagtttctcgcttccatctccgccgtcatcgctgcctgcgctctggccgtctccgccgatgtagccacgggccccgtttggggctaccgtgccaacgacgccagcatggtgcacacgtccaagtgggcgaagcactggaaggcgtgcggaggtgttcgtcaatcgcccatcgacatcaagaccgtggcaaaatcgggcaagggcaagaagagcccgctccgattcagtggccgctgctcgcactacaacctgacggagccgcacgagccgctcgaggtggacgtcatcggaggtttgtggtgtgaatgaagcgtagctcttggattgacatgatccggctaactttaatttatcgcaattggtacaggtaactgcatggcctccgtgaacggtgcggagtacaagatggcgcagttccacctgcacgccccgtcggagcacaccgtaaatggcaaggcccacgacggggagatccacttcgtacacaagagccacaaaggctccgctctgttggtggtcggtatcttcctggacatcgctcccaagtcggacgtttggctgggaccagttcttgacgccctcgagaacgtcaactcgaccgcgcacaagaaaaacgaggctatcaccgttcagttgtaagtacaacagaggactgcgctgggtccagtatttcgcttgtacagctccactcactatttcgtttccggttgtataggagatcgtactcgaacctgatcaagaaggcgagcaagaactgcggcatcttcaactacccgggcagcctcacaacccctggctgtgatgagactgcggactggtgggtggtgcagaccccaatccaaatctcgtctgctgactttactcgtcttcacaaggatttgatggagtaccacatcacggatgacggcaacaatgctcgccccgtgcagcctctgaacggccgtaaggtcgcgcgctacaactaggatcagtatgcagcgaaaattgttgtggaatgttgttgtttgttattctctgcatagaataaattgagcacaatccgtttgatatataatactgtgaagtggctttctagcagttgccactctacattttacaccacagttttgctagagcttcaggagacgagtccgatcttttggttggcggaaaagtaggcctgtcgtttggcccacgacgccgtgtccgggtagatgaatatcgggtagagcttgttgccatgagaagcagtagagagcattgactgctcgttgtagtcgaagtcgaacgtcatttccgtgtcgtactggtccaaacacgggggctacgacaccagaaacgagaaatcgccaggttttagtgaacgtggaggaaagaataaatattagaatccaattcagagccacggacctcggtgcaataataccagcccaagacgtcgtgcttctgccacgagctactggttgacgctgtaaatccctgcaagtacacaattgtctgtcgcattagcgacttccaccaccaccaccaccaccaccgcaaccatttttattgctaacaacgtaccacgaatgcctcatcagaatccagtctcactgtagccgctaaattgatcggaatcgccaagatgggcgtatcggttttgatgccttcatccataaacaccaccagtgttccaactcttcggccttctgacacgtctttaatgaacttgtgcagattcgttgtcgccgagaagtaaggcacgtagttatactgcatcaaaaggggagtgttagtagagaagcatttcgtcgcaggtaagtgcacgcatcaccttcaattccgggtagtagcgtatttttacaatgtgtaccttgccatcggcgagatcatgtacagcagccgccgaaattcgagccctttcggagttcgtgttgctgttttgacctcgtgagtaaatagcaacatggtcgtagaagacatcgtctccaacgctttcatcgttgaaccacgtgtcgaactcgacggcaagtgaattttgaagcccagggaatcccatgctggaaccttgggctcccagtgtcgctgtgcggttttggtgggaatgtatcacgaatgccaagccgtccccaccatgaactgcacagctttggtactcgcggagcccgaagttctggtctttgacttcgaagcagcgccgagactggtcggtgatctggaacgtgaaccgtgtctcgaaaccctgcaacactggtagctgctgcgcgtaccagattgacgagacttggtgcggttgagaggcagtgaggcgtagacgcacaggacatcgaagtttctcctcactcgcctgataaacgtcgcgatggccaagcaccgccgtctccacggcgatacgcgcacttgtcgtgtggttctcagtatcacgagtctctagacgaattgcttcttgctgctcggtcaatacagcttccagtgtggcttcgcgcgcatcattggcgccggagaatttcgagtacgcagtctgaatcgtacaggataaaccgcgaaatcagtaaatatttcaatctcagcacaaaattgagcgaatgcatacacttgggaatggtgcacagctactcgtagccgcttttccatttagaactagcccagttgtgccattgaagtcgtagtacacgaattctgcacgaaccagatcgggtgtggacaaaaagagtaagcaacttgcaggaacaatcacctagctaaccgttgagataaggcgcacctgctgcgactgcatctacaatgaaagcggtcaacagcgcaagcgcgcttgatatcttcatgagtcgcttgtcggtagatttggtttgaccaagtgactcttcgaagtctcaattttaattgagacacagattatttactggaaggccacttcaaattatgctggtttcatcaaaattaaatccgtaaatggcgcaaaccaccccaaactttgacgatgccctcggaagcatctaaagcatgtcctagcacgttttcacgctctggttgctgctagtttaggcagtagtagccttcctattctcctacccatgagaccaccacttagctgtccattgttgatactgaagctcagttgtttgaagggtcgcatgagtgatgacatgcattttcagtcgagtggttgcacttcatagcatgctctgcgtttaataatgctcttcctcccgagtgcatttgcttatcatttagagcacacgcagggctatccgaagaagtatttatccccatgtagaatgacctaacggatttaaaagacttttgacctagcataccaaatgacggcttttcgtgaccttccagtaaataatctgttaaaattgaaaaagaaaaggggatattgcaattcggtaccagttttggctgggaatttgctgggacccggagtacattgcgcatgtgcccgaatggatagtcaggtacgttatgttcattttcgtacggaaaatggacattgtaccgtaggtactcagaagttagaagtttcctcaagtttttcctcagaattcagacttggcgagcccttcctcgagaagtaagaaaaaatcctcaaaaataagtagcaccccgataggtattcgacgcatagcccacaagttcagagttccgctgctaaaatgatgaccctgaaagaaccacacaagcgatcaactcgtcggaatgagcgagcgcaatgtgtgtggccggccaccgtcgctaactttaacgcccgcccgcacgcctcttcggtgtcagtactgattgctctgattagcaacagaaaacgctgggtctgacccagtgttgtgggcctggtactgaacagaaagtcttttcaaaatctggtaccaaatagcaatttccccaaaagaaaagcatgtcaaactgacacaaactactacgtagtacgaaacctggcatcaccatttccaattagcatttcacattgactttttcccactacttatcatcacaccaacatctacttcatgcattcaaccttacttaaggtcgctgcttcttccacgtgtagaagccccggtagaacggtttgctggccttgagttcgtagcagtccgtctcgacaacccgctggttctccacataccactggaacatctctcggcaccgccccgctccactcagtgcgttcttcttctcgccacacctgtgctccctcgcctcccgcaccaactcgtagtagcgcttgcacgtcttggacccaatgtagtccacgtacccttcccaaaaggcctcggagtttgctgttcggtcacaaagttggtccagctcgtgtcgcgtagacttgtacattgtgaacacttcgtggcagtagagcggccacatagtctgcttccagggtcggtgggcgttcacccccgagcattctacggcggccttggcttctgtggcgtggaacaggcgacacgcgttgtgcttctgccagacggagaatttctccagaaacaccaacgcctgggtctgatcgttagaatcggcaggtaaatcttggacgcagcgagtgagcgtggcgttgtgctggtagaacaaggtgaagctctcggcgcatttcgggttttggtcggaagtcgccgtgttgtgcgggtccgagtcgcagtttttggctacgaagtcgcagatgaccacgaagttggagcacaagtcctgcatctgcagcgcgagagggaggtgcgagcttggaggcggaagccgcggggccactgcgactacatcggcggggcgaacgaggctcacacgcacgcacagcaccgcgagcaagagcaggagaaggctgtgcggtgccatgcctttgatatgcggataggatttgattaattgagagaggtttgagtaaattacgaggtcatttatgaaattacttgtgaaatactgaagtcggttggtgcacttctgtaccagaaagtatagacaacgccaccctccgaccctatcgcgggcatgggactacgtgagagttttatggagctccgttgacgtagctccggattgtcttcatcaaaacgtctccccatcgctcgactcccgcctgaagttcctgccacgtaacttcagacacggggaactgaggactatgaagtttcacgaacgcagcgcgccgcagcgtcactaccagctcaccagcgccgtccatgggtcgcctactagccttcaaaacgatagctcccgaggtatcaagccgaactcgttcactcggaaaatacgggtacagctcatcttcgtcaatgcagtcgagcgccagaacgccgaccgcctcgccttccttcttcccagtaaacaagtgcgagaatgtagcgatgctgctctcaacaagcgtgtagttctccgaatgcgataggacacggatgttgctcacacttccagcgatggtgtcatactcgtctctcactgttgtgtggcccaacctcgccgaaatatcaatctcgatgttgctgtagtggaagagcaccgcttcccacactttctctaagctttccaccaccggaaagtgcatcgtctcactgtgcatcccgcagatgtctccgtttgacgtctcgtagcgatggtccgatgtgtggggcttgaccgacctcccggttgtcatcagaaagtcataagcgttctgcagcttttgctcgcgcacggacattaaagtcgcccggcgttcatcccagtccctcgtcaggcagatccgcgtatacagcgggtgcgactcctgcggcccagcgaagctgccagcatggagtgtgccctggctactttaagctgctggtccttggccacagacatcatcaatctattgtccgccactagagcttgcacctccgggtccagcagcaccacatcttgaggaggaagcgagcggagctggagctcctttagctcggacgacagacgctgcgcctcttgacggagctgctcggcctcctcctgcagtagacacgagccagagtagagtagtaaaaaacaaaagtgtgcgtgctaaggggagggggcattaggccaagctgcgagcgcaacgtactcttcgtgctgtatacgtcgacttccgcttcttcatcagagcgaggaatctggtcaaatgcaaattttatggaacactacagtagagccaatcagcaagttgccctacctgtgcaggtacaggttcacaagctactttgggcaaataaatatgtgctatttgttcgcttatcttcaaaactggtacgcccgacgtcatctattagttggcgttgcccccttcatccgaggtcgtcacagaccttttagtcggcgttgttcccctcgtccgaggtcgtgacagaccagacgcccgactgcaacgaggacgagctgcgttcagacgcgtggatcatgcgctcaaggatcaccacgatctcggcggcggtggggcggtcgcccgggtctttctgcaggcagcagtccgccaggtctagaatggccttggggcagtcgctcgagaagctcggacgcagctttccctccgccaccaagctcaagatctccgcctcctggatcttgccgcggttcgacttgttctcgtcgttccagaacggatagtcgtccgtgtcgatctcggacagcaccacgccgaacgagtagatatccgccgcttcatcgtaatctcgacccaggagcacctcgggggcgatccagaacgacgtccccacccccgcagtcatgtgcgtctcgaccaggtaccgcatgcgcgcaataccaaaatcgctcagcttggcctccaggtacatgttgagcagcacgttcttggacttgagatcgcggtggatgatcttgggcttgagcgcgtgaaggtatgacaaggcctccgcaatatgcagcgcaattgtggctttgtgcgactcccacgagagacgctcgcccttgagcttgtagccgtgcagtacatcgcgcaggtcgccattgtccatgaactcggtcactgcggacaggtgtctgaggttgtcccaagccacaccaacgaactcgacgatgcgaggatggtacagcactgccatcatgatgatctccttgaggaattgctcgatctcggccgcggaagcactgcggtccgggcggatcttcttgatggcgacgcgtctgcccttgtattcgcccatgaacaccagcccgaagccgcccttgctgatacacttgcccatcttcagcagcttgtggtccaggcggttcgtgacgatcactgggtcgttcaagaacaccgggtccacttgtacttgcgtatcgtcgaagtcgagcgtgtcgccaaaatcttgcgagtagaagtcgtcttttgaagaggacatgcgctgagccttcttgtaggagaagtgccgccaaagaagaagcgcagccacggcgatgacgatgatacagcctcctgctactaggccgatgagcaaagagttggagccgcctgacgatgcggtctctgtggaggatatcaacatgaagaagtgagtatttcaagggaaaagtgtcagggttgcgctcttgaaacacagtgaacgtaccagttgtagcgctgtcgtcggccacgcaaaaagttcgattgtgtgcagtttgccacgccccgtcagtgcaagtagctgacgcgtcaggaagatcagagtcgaacgccagcaacgcctggatagcactgaagaccgtcgaactgatattgaaatcagtgatatcgttctctgcgatgtatctgtgcgcgcagaaaaataacgtctgtcagatcaacggcattatcatagtttcagaggtgcagcactcacagttcttgcaagttgtccacgttgaagaccaccgttgggaaagttgagatgttattgttggtcaaatttctactcgaggcaacaagcaaaagcgttagactttagcgtcaaatacaaccgcccgatatgaatcgttcacttacaagactttgacagcgcagaactgattcgagcacgagtgcgcgatggatgacccaacgtacgcagccgttaggtggttcgatgacatatccctggggcacaaacgcgcaccagaagctttggtaagtcacaacccggctaaacattatcagtagccagcacttacagatactgcacgttgtcaagcccttcgaagaaatcgtacccaaacttgatcatgttgcagttccgcagcgtactgcaaaccacacacagcaacgagattagcgtcaaaagagtgccgcgaatgcgttgcctttatccaagtgagctcacatgttcagcgttgtagacgggtaaaacgtggaagcagtctgtgtgatcgacgacatgtcaatgttctccagcgagctgctccatcaacaacaacaccccacactgttagctctcactagacgacaccaccagctaagattatcaggccacctacacagtcgtaatggcgatggatccgtcctccacgtccgctatcggcagcgtggaccctggcagatcctgatcctgcggcacgaacgtaatcgtctgcgggtacgtcccctccccaacaatcctcctaaaggcgcaaacacgcagcactatcagcttctccgtctacactaaaacgtccacaatagccacagactcacagcgtcgtgaggctggagggcacgagcagcgtccggatcgagtcgacggccagcacgtcctctgacgtgagcgtcgtcgggtagctgtcgccgccctcgtccgtcctcagcgtgacgtggaactcccacgtgtccgtgtccgagtagcccgtcgacaggcacgagcacgaggcgttgacggccgtgaagatgtcggggcagccgccgttcggcgtcgcctcgtccgtgcggcgctgcaccgacggcacgccgtcgcatatgacgtcgctgctcgagaggttgttgagcgccgagttgaaccccaccgccagctgcgtctcgttgtcgtcgaagttggacgtgaaccattcctgcgccaaagtctccgctttggtgacggccaccgacgcggcggtagaagaggacgaggaggaggacgaggagctctgcgcgtgtgccattgagatactacggacgacccacagcagtgcgcatgcaactggcagacgcgtccattccgaccgcgtcatgccggcaggcgagatatctcccaggtctcctcagttcgagagctgctatagctggtcgacgatgccaagtggggactgactcgaggtactgtcggcagcatcccgccaatcatggaatttagcgtggcccgaaaattccagtcgtatcagatgctcagctcatactttatgtatcggccccggcaggagcctaaggtatcttgcttgccctaagagaacggatcctagcgaagtggcttcccaacactcactgcagtagttgctgactcagcaggctcgaagtccgaacgaattcatctgccttcgccgccatctttgccatctcggtcggagattcgtcagagattctccgatgggagctcagccccgtttgccagtacgtacctgcatgaagagcgaacctcgatagcgtgggagtcgacagaattccgttgactgtcgacaatcattgatccttccgctagtcggccactagggtggcgatcacagcaaacgtgttcgacaatgtcgtgagccatcgtgaagtgaaaactaacttcgcactgcaaagtttgcaatacatgtattgtgccaagtgtggctcctcaatgcctcctcaaccactggcattgagtagcgagctgcacccgtgcgcaccgatatggcctgaggtgggcagcactcgccgggcgcagtggcacttagtcctgaccgcctgcacgctggttggagagcctagcggcattctcccagcacgagcaaattcgcctccgccggtttaacggattgaagttcaacggatcgcagcagattgtgcattatcaaaacaagtggcagtctgtacagatatcctgtgagaatgagtgttttgcccccatgcttattccattaacacgtgcctagaaactggagtctcaatcgctgactaaaatgctgcgtggccctggattaatgcagacaacccgacggcagaccgaagtgtaagcaaggtcggcattttttcaaccgagcaaccgaaaactcaattcgcagagaaacgaaatagatcgctccctgtttactaagttagtaaacaggtaatactaacgtcacccagaaatcggtacagacaaatcaacgtctgggatcttataaacggcctttcactccataaccaacgaggcttgacaaccgggtccgctttggtatgtttgcctagcatttcacactggcgacacccgtcgttgcttgttgtgcgtgactattgctatgtaggatgcttggttgcttgctcgagctgctccctgccagcgttacccttcattgctccctcatttccaatttgctcgcgacgaagcaaatctaccaccaccgcccagcccgcaccacacagcaatgaccaagtgcttcgccatcaccactgtgttggtcgcctgcgctctgtcggccacatccgtcactgctgacggtgcaacgagtgctacctgggggtacaagcataacgactcgagcatggctaacccggagcactgggcggagcagtacccgtcgtgcggtggctcgaagcagtcgcccattgatattgagatgtccggtggctgcaatgctgaggcgcgctcgctgacgttcagcggtcagtgcacggactacaacctcacccaatccgacgaggcgttcaaggccgctgtcaacggaggtacgagcactacgtctgcagactattgggtcgtctaatatatttttctgttgataggttcctgtgccgtgtcagcgaacaatgcgtcgtacaacatggtgcagttccacctgcacagtccttcggatcacacgctgagcggagagcacctcgacgctgaagttcactttgtgcacaacaacacgaacggttctgcgattctggttgtcggtgtcttcttcaaggctgtcgacggaggtgagactaatccctgggtggcctccgttctggacgcgctcgacacggtcagcatgaactcgacggtgtccatgtcaacgtaagttttgctgtttgctgcccctcgatggcatggacttaacctatctgtgtgtttgtatgaagtacatcgtacgctgacgtagttaccactgctgccgacgcccacggagtgttcaactacgctgggagtctcaccaccccgccatgcagtgaaatcgtggactggtgggtcgtcaagcagcccgtgaatatctccacgaccgacctcgcccgcctgcagtcgcagctgaaggaaatccccattacggacgacggcaagaacgcacgcccggtacacccgctcaacggtcgcgtcgtcgccgcatacctctagattcctagctccatgttcctgcttacatttcataagagcctgttcgctacgtagctggagatggccctgtaaatctctaggtagctccaagagctggagacgaattcacagtgccatctctagttgtcttgttgtgtgctacctacttttgaccaatccggtcacacttttggttttcgtctccaggcacaacatgggagacgaagatgcacttgtcctcgctgcgtgctccgccgtggcacaggctgtggctttgtatgcagacagttgcgaaccaggacctcctgctggcaagaagaaccgttttaccgtcaccactctgcgcttcgagtcgatgcttcaatcatcagcctattcaagctggttcgagaccaatctgcgctgtacgaggtccaccttcttccgtatagctagctttctacaagagcatggggtcgcttttgcacaagctaaggtcaagaagcattcctacgaaaagaaggtggcagcggcgctgtatttcctgggctcagcgggtggatatcgcgaggtgggagctgcaatgggcatggctagaagctacgtcatggagatcactacggaggtagacgttagaagctcctttcagacgagacttgcctcggccctgtgctgcttgcgatgcggccgaggcttgcagacgctcgagcatgcgagatggagcgggagtaggctctggcgtagcagacatcgccactgatacttgagctagcggaacaaatgttgacgcagtctcggcgccttctagcagcagaccttcatcaccggcagatggtgtcagcgagacgaggggctcggacgctggcgtttcgtcatgacgtgcggggggcgcaggaaccgaagagccttgagcagcggcatgtgccgcacgcgtggccgcactggtgaggcgagtcggcattttctcaagtggggaggagagccatcccatatctgtcctgtgattggcttaaaatttgtctggagatggatacatagcgaacgagctgtaggtggagatcaagcaccatctccatctctagtacaacgcgaacaggctctaagcatccactagagatcatgaacacgatttgccttgaaacgtgccttgctcgctgagcacgtccagcctggatgtgctcaggggaccgcccccatattatgcttccagcgacttggtcaatccacctggttctccgtgctgcgaggaaggaatcgaccgtgcgtacgctttcagacagaagcaaactgttcgacaccttgctgggcttcatcgagctcgcggcttttcgagagggcgatggagattgcgacgcgcaacttcacgcagtaagcacctcgtattgcactgtgtttactacgtgaagtgcgaaagagttctgcaaagagagccgttcgcaaaagtgttgtcgccgcagagccacaacatgcaactgaacactctcttttctacggagggataggaacgatcgggcggcacacttggtcgttggtgactgccgaacgcaagctttgacgtcgcgtcaagatcactgctcggtaacgtctcgccgaggtttcctgccagatggagggcataagcaacacaccgggaaatgtgccgtgttacttcgaagtgcactcagatcagtgcagattaggaagattcgctttcaaaatgctctatatgcacagactaacctagaatctaaagcaccagcaagactatcaaaactgggtgttcatggttttacttgcactggatcaaccaacttctggtaagacactacaacatggaagcaccaatgcatgcacttcgtctgctaggcgttcgaacgcaaaaaaactaagcgtcgaactcaaggaaaatgatactacgccctatcattcataccacgatcaggtgaggatccagcactatgccgtcggccaaagctttgcatcgcaatctttctggtttccgtttacaggtaatccttcatgctgtactctagtctgtggacttatccctggtcgagctccgaaaactctcgttcgttctcaagatcgatatcgacaaatcgagatttgtatgttgcagtccgatctcacttcgtttggatgttcgttttgccggtgcagcacggcaaaagctcccctggccccacgagcaaggtacaattccgcgtgtccggttgtttatgacagcaaggttgccgtgtgtgacgttcggtggaccccgcacagcacactgcttacggtggcaaatcgcggaatcggcaccatcccaggcaaaaatgtggagctctgcggttgccctcttgccttgcctcactgcctgcactcggtcctcgtccctacagcgggagttaccgcgtttggggtcgtgatttttaatcaaaaaagaagtcgtcatttccgaatttaacagctcttcgacaccaccaccgcgacaacagaacagcccccaatgaagttcatcgccacttccgctgccgttgttgctgcttacgcacttcccgcttcaaccgttgctgctggtggagctgaaggcgctgcgtggggctacaagaacaacgatacggctatggccagcccggctcagtggggcgagcactaccctcactgcgatggcaccatccagtctcccatcgacatcgtgtcgtcggatggcaagcagagcaccaaggcgaagagtaccctccgattccgcggagactgcccctctttcaacctcactcagaccgaggaagggttcaaggcgagcgttgtcaaaggtgcgtagatgattgtactcatcaatttgcaagcacccagtacaagtatcaacttctccttcgtttcttttgcaggcacgtgccaggtgaaggcaaacgctgccaaatacgacttggcccagttccacgtccacgctccgtccgagcacacgctgaatggagaccccctcgacggagaagttcacttcgtccacagcaacgccgacggttctgccctcctcgtggtcggtgtcttcatggagattgacccctccggtgacacggacccgtggctggagtcggttattgacggcattgacgacgtcactcccacttcctccaccatgatgaaattgtacgttgcattattctcggctacccgcgtagagttacttacgatatcgtgattggcttataggacatcatactcggcccttgtgaagaagagtctgcagggcagtagtctctacaactaccctggaagcctcacgacgccggggtgcgacgagattgtcgattggtgggtcgtggagcagccagtcaagatttcagcgaaggacctcacgcgtcttcgcgaaaaccagggagaaatccaaatgatgaaccatggagagaatgctcgaccggtgcagcctctgaacgatcgcactgtcaccagttttgagtagatgtcatcgaggttttcgttaatgtagcagtgttttgccttgttgcatacggaataggttcaccaaaaggtatcgtctattatgccagtaacgtggacaaacacaaattactacaaaacattcgaaatttctcaaaatcaatacaatattatagataacatagaagtaatttacatcgccgtaatcaaacttttatgcatatccaattaattcacatatattgtaatattaaacattgtataataataatatttcccaataacaggtatttaactgcaatacatttatgattgtattatataaataatgttttgtcgcaaccacctgctctctaggtttggacgccagcttaaccccagtccaaatttgtcctaggaaaaaggaccaaattggtttttggtgtggcgtacataagccgatttgtcctacctcgagcccggtaggacgaaaaatgactagacatttgtatacccgccttaaggatagagactgtcgcttctaacaaatcacgcatttgtatcggagcttaaaatactcagatccagtcaaatcctcaaatttgtcctagcagctaggacaaattcgtcaaagtgatatgttattagagacaatgttcaaattgcctttatgtctacaaggacaatcgattaagtgaagctgatccgtcaacagagagattaaggaaagggttttctgcccatgctaagaaaacttaatattcatgtgtcgttttatgacagtggggcgccaaagttttggtcctttcgtttgtcctaggaacgatctggggggggttaaggaaactcttcaggaatttaaaatcatagagtgctgtgtcgcgctaactgataaggatctttggtaccgatggtagtgcagacactgcattcctttgaagtcaacattttggcatccaatgcggccaatgtagttaaacaattcctcaaccctactgtagtctcgaggaacgaccgcaccgttgtttacatgttagtaaatgttcattcaatacaaaagcacatgttgcatactcgcctcatggtccggataccttgttagcctaccgacttacgacagcgtctgggtgcatgtattcgtgggcgtatggcaggaactgctcgactcgaacaagtgctacatttagagttgttgtgccaaattcgtaccagaatacagaatcgtcgtgctcgcgaggagtccatgcagacgaaagaaaccacatagcaattctgcttcgtctcaagtctcgctgcaattcctcatgcagccaccgtgcttggaataatagatatactccatagtagccaattgtgcttgttaccaccagcaggtttagtgagagtagggaactccttgtggctcggggacaagacgataggaggaccctggagtcccgttagtatccgcaatgtcggaagctaaccatttggtttgctaggctcgccctccctataccttttgctccaaacaataggcatgcaacgggagagcgccgctgcgagtctgcctctctgtgtaggccagccataagaaactcgtcgcgatggaagccccaccgagcaggcgcagtaagcttgcggtggttgctgtcgtggcgtttatctatcaggcactcgaagtttgtatcgcgcagggatcgttttcagcctcgtcgtcgtcaggagcatggtcatcctccagtggctctgaagttggctttgttcccgttacaacagtagccgaggagttggctcaggaatggttcaccgagaacttttgggacaacatgacgcagttggcggttggcgtggactcaaagctgaaaaacttgtctactagcgatgtgatctgcagtggcatgccatcgctccagcgacgctccgctgaaactctccccaactccggctgccccgacattttcacggcgatcgatgcttcatgcacgtgtctgatcagcggctacaacggcactgacacttgggagtttcgagtagcccagcgcagcgtcgacagcgagtacccagccaaactcacttccgcggatgttctacatgtcgacgctatcaggacgatgctggtgcctccaacgctcaagacgctgtatgttcgtgtgtattatggttgtttgtatcgccttcgaactaactagtgcgacgctgcttgcagtcgtatcgtcggagaaggaagttcgccacaggacattcaattcgcgccggaagataggcgtatccctggcactgcgttacctgttgctaccagccccaacgactcgatctccgtatcgtccgtgtgagtacaggtttcgatggtgagttccgtgattgatacccttgctaaccagtcgatttttacagggaaattatcaacattaacatgttttcaatcacgctctcagcgtcctcctttctgccgccaacaacgaccaatctgtgagtgtaatttgtgaaaagtggcatgaatcatagtctaacactgtcatcactcctgcgtctcgtagtaccctgcgaaactgcaacttgttcggctttggcttccgatttttcgacggagtgactgggcttaagtacttgtaagtcatcggtggcaaaaaaagttgctcaataatgcgctaacttgttattttcctgtcggtatttaacagggatctgtcgtccaactcgttgactgttccttacgctggatcaactacccagagcacttgctccaatgaattctgcacgattgaaacactgtacgtggtcgaaccgtgatcaagatgtatttgagtttatactaacaacacttttcttcgtttgatccatcgcaggaatctcaccaacaatagcctgacagcgttccctaccgtggtattcaacatcgacaatctacaggagctgtacgtgtttctctctgcaaccatgaaatatctccccggttggtctgacatcacaccataatcccttccaggtacattgcccataacgacatcacggacttcaacatcagcaactcgacgttcgccgctatcaagaacttggcggtcttcgagtctgatcaaccggacccagcggccacctgcccctgcggaacgtggcaaacagcgcacaactcgcggttttgcgttgccaacagcacaatctcaatcccaggtacgcacgcaatcatcgctctcgtatcaacgtcaacaccaagctaatactttgtggtattgtgggtttctgccttgacagaaacaagttcagggacgtgcaccgaatgcatcctctacgtgagtatcatcggcggctgcgtagtggtggccctcatagtgctgctgttgtggcaacgagcccgccttcgtcaacgagcttccatgccctcggctgagtcctcgccctccagctactacctcgccaggagcggtggcgagaccgcaaacttccagtcttccgacaaaaccaccaccgaggcgttactggaggacccgatcattgtcacgaaccgcatcaactacaaggaggtcaaactaggcaagtgtctaagcagaggcggcttcggcctggtgttcgtcgggcagtacaagggccgccaggtcgcggtcaagaagatccgacccgaccgcagcctcgacccgaaggacgtcaaggccttcctcaaggagatcatcctcatggcggagctgcaccacccgcgcatcgtcgagttcgtcggcgtggcttgggacaacctcaagcacttgtccgccgtctcggagttcatggagggcggagacctccgacacgtgctgcggagcttcaagcgccagggcagtccgttgtcctggaggagccacaaggccgtcatcgcgctgcatatcgccgaagccatgcactacctgcactcgcactcgcccaaggtgatccaccgcgacctcaagtccaagaacgtgctgctgaaccgccacctggaggccaagctcacggactttggcgtctctcgagcgcagtactcggtgcagacccacgccatgaccgccggcatcgggacgtccttctggatcgcgcccgaggttctgctgggccgcgactacaacgagcaggccgacatctactcgttcggcgtcgtgctgtcggagatcgacacggacgactacccgtactggaacgacgccaaccgtgacggagctcggggcaaactcgaggaggccgacatcctccggcaggtggccaagggcaacaagcgaccgcagttctcgcccaactgccccgccgccatcgtgctgctggccgagagctgcctgcagaaggaccccaaggaccgaccgaccgccgcgaacatcgtcgacacgctgcagcagcttctgggctcgagtctcgcgcccagtctgtccgactcggagtcgtccccagcatcgggctctgcgtggactgcagactctagacaatagatacatggatgtgtgtgtatgtgtatgttaatgtccaccaacatgtcaatagagtgaataactgtcctcaaggacacccggctgatctttactggtcgtatctgatgtacccaaagccaagacagtagcacggtacaatggtgcggtgtccgtgcacgtgcatgaagctgtgaatgggaagccagatggacctcctctgtgctttgggtccagcggagaccgagacgctctctggctgtcgaccctgaatccgccggtatgcggtgggaactcacgcccaaagcagactagcgtccggacccacagattgatagtcggtgtcatagagacttagtctgcgatagccgccgtacgaggcagcgctgcttccatgacggccggccatcgtcactgcagcctcataacgctttgctggctgctgtggctgtggagtgcagcagcagctcagagctcttcgtcgtcgtcgtcgtcatcgctatcgtcgtcgggttcaagggcttcgaatacgacggaggctggcgacgtgacgccggcggaggtgctggcccaggactggttcgaggccaactcggacgcgaacgtgacgtatctggcggtgggggtggactcggcgctctcgaacatctctggcagcgacgccatctgcgggaagggcgtgccgtcgctgcagcggcgtacgccgaatgagctgtccaacggcggctgtcctgccgtcttcacggctctgaatgggtcctgcacgtgtcttcccgactacaacaactccgaatcctgggggttcttggtgacggcaaggacctcggaggaggaatacgactatccgcttactatgaacgcgacggatgtgctgcccatcgattcgattcgaacgctcttggtgccgtcgacggtcgtatcgatgtaagtatagacctgcgctttcgtacttcgagagtactaatacttttttacattctagatcgattacaggcgtgggggaggaacctcaagctatctccttcgtgccgcaagatgtggacttgccgggatccgacatccccatcgctgtgaatgaagaggctactagcgacgccacctccatcacagccgtgtgcgtactacgaatattaccggttttcttttttttacctcaggctaaccttttgctgccatgtaggcgcctggaaaacatcgacatgtcctctgttgtgctgaacgtcggctacttcttcccagccactactcttaacctgtaaggcgtaggtttgtgcaacgcgaagctcttggtggggaggagatggtgggctaacgttcaggctggtgaattgttttgctacagtacaatgagaaactgtgggttggaaaagtttggctacgatttctttcaaggactcaactcggtcgaatacctgtgcgtacgtcggtgattcaatgctggaattgggggtgagggctaatatttttgtttgtttgttgggtttgtactgaacgagcagcgatctgtcggagaacaagcttgctacggcatatgccggcaacaccatcgggaaaacttgtacaactacattctgcgcagttcagattttgtaagttctgtacttccatttaattttttttctgtatctaacaccatgctgtgggttggacaggaatctaactggaaatgtgctgacaagtttcccttcggttgtcttcaacctcgacgacctcagtgaattgtaagatgcctgtgaaaaacctgttttctgtggagtaaacgatctagatattcaagttgctgacttttgtgcgtccaatgaccaacagataccttcgcaacaacaatattacggacttcaacgtcagcgcttccgtcttcagttcgatctcggcattacgagcatacgagtcggaccaaccagacgagttggctacttgcactggtggcacgtggcaaaccgcacacaatgttacgttttgtgtcctcgatacctccacagcagcggagggtacgtttgatcaacctgcatttgtttcatgttcgttgcatgaatcttaatttttacctgttcctttatgcattcttcctgagctagattcatcgagcagcaccagttcccttgtctacgttgcgattgcagctggatccgtcgtagtaatgctcttgatcatttttgtgtggatgaagtggggtcctcgatcagacatagagcgtctgtcctcctcctccaagatcgacagcactagagcgtcaaacttggatgaaacaaggcgggaagtaaatcaagctcttctcgaagacccagtgattgtgaccaaccgtatcgagtacaagcagttgagactcggcaagtgtatcagcaaagggggcttcggattagtattcaccggggaatacaaaggccgtcgcgtggctatcaagaaaattcgcccagatcgcagcggagacgtctcggagattgaggtctttctcaaggagatcattatgatggcggtgttgtatcatccgcgcattgtcgagttcatcggtgtgacctgggacaacttacgccacctggcagcggtgactgagttcatggataatggcgatcttcgagaagttctgtatactttcaaggaacggggttcgcctttgtcgtggcaaacgcacaaagcttctatttcgctgcatattgtcgaggcgctagcttatctgcactcgcagcatccgaaagtaatccaccgcgacctcaagtccaagaacgtgctgctgaacttgtattacgaggccaagttgagcgacttcggcatttcgcgcatgcggtacgacatggagacgcacatgacggcgggggtgggcacttcgttttggattgcacccgaaattctgctcggtcgggactacgacgagcgcgcagacatttattccttcggcgtggtcctctcggaaatcgacacggacgactatccgtactggaacgacaacaaccctcacgcagctcgcggcaaaatccaggaggccgagatcttgagccaagtcgccgtgggccacatgcggccggagttttcggtggattgcccagaggagatactggcattagcagacgcgtgcctgcagaaagacccacggaaccgaccgaccgcagcggagatcgtgatgatcctccagaatttgattcatccttcacgctgcgggtcatcgtcgcagatgtccgacgactccggatcgatatggtcggttgaaagtccgagcaatatcattctgtaatgaatggatcgacgaggaagaaactctaattcggtgagaatataacgcggaagtatctcgaatcgatcatcgatcgattaaatttttgtgtagaatgacagtatccttcgatactacacttagagctctgttcgcccgcttattaatggagaaccaagccccatgtttttgtgcagcatcggaggaggaaacgctccttcttgtcctcggtctcaaggcgcgaaaccctttttgggaacgaattctgaggccacgagcgaaagaaaccgcttttgccgacgacgcgctcgaaatactaacccacgatttcgagcagttcgttcatattgaacgataaaagggaacgttatgaataggtttgcgagtgagtttagcgtgctgcaacggtagccgcgttttgagatagggtggcatggcttcaagatgactccagttggactgcggtgggtgtggcgcttagctttgcaccaggccactaataaccgtttaaccctgtaccaagatcaagggctccgcgggttctgatgtatactttcactttgtgcctcttgtccaactcgcatcctcgctcttgtatgtccaccgtttccagacaagagcatgctccggcgccctctattgttaggatgcgaagttctaaagtattgctagccccagggaacagagagagccacgcgacgtgtgtggcttgagagcgcctcatctcgtggcgttggcgttactaggatagcagtagccattcgctgatacagggcgatactgaggttgcgttgccaaaactaaatagtgttcaacgtttcaggataattaatagtgctgtgtgtttgccgtaggacgcaacggccacttccacttttcaatccaccactcgccccgatcccacgtcgagcagccagccaaggggccatttctagtcccagacaagaccctgcacaagaccaacggcaaataacggacgtaaacgaccccagttgggctccttctcaagctattcttacaaaaaggttagcagtttctgctaacactaacactgttcggaggcccgcagtagcgtgtgcgccgctggggcctgcgacattcgccattttgcagcagacttggacatttacctgtctcccgagtcttcacacctgccgttatgaatccgcagtcgcagtgcccaaactcagcccgagtgagccctcctagaaatccctccagaaaccagcacctcgatgaccccttcgtggtctttcaagcacaaacttcgaccgatgctttcgctttagagccaactgtggtcacgacagccaggtcccggactttcgagcgcctcaaccacagttctgcgcatggtcaagacccgctcaatgctctcgatcttgtgctggccgagtctccgatcgcaaacaattctcggaagcgagtcttgccgacttcggtcgcgttgatgatgtccagaggcagtagtcaccaacagagcccgtccattctggagcgctacgctcaaaccgtcccgctgtctgcatcctgccaaagcgtccaaaagcgttgtctgtttccagactgcaccaagatgtccgtgagcaaggggctgtgccgaggtcacggaggcggccgtcgatgccacttcgcagggggttgtaccaaaagtgctcaaagccgcagcatgttctgctgggcacacggtggcggtcagcgctgcgatatggacggctgcatgcggtcgcgtaagaccaaacacttttgcgtcgctcacgtgcgccacgaagcggagggcgccaggagcgaccagctacttgctggcaaaaacagtcgagcacctcacacgcgacgcagccgctacgtccctgtgcccacgcgaactcatcacctgccctcgcagaggttgctccccagcttgggccaagcgctgagcgctgcgtcactttcgctcccgagcttccccattctccccgaagtccgagctcgctgcattgatgaatgaagccaggctggtccggtagaactacacaacaaacaccaccaacaagatatttaccaggttagtagacaacaactggggccgagttctcaacgtacaaaacgtggagcagcacactccacacgaatagatttatatcttagtcactagttcccggccacgaccggaattcactcttatatcgcgaggcgaggggtgctggcggcgagggcgtcgtcgtcgcggaagtccacacagtttcggacgaatattgcgttggcaccgtgcgcagcagcgcctcattaaggctgggaagctgcagcgcaggcggcgggataccagacacctctccggcgtactggtggtattgggcagtatacttgcgttgctcgtgaaggacgtactcccccgacggcatgcgcatgttctctttgttgtggacggccgacaagccactgtcgcaggagacagtggactggcggccgacgctgtcgtccgagtccgcactagtgtatgagctggaggaagtcttagacttggacgcagccttcgcggccttcgtagacatcggcttgggcacactgtccgagtccggcatggggacggtaagctccatgtccacgtgatccacacagaaccgcttggtcttgcggctacggcggcagtttggcgcctcgcagcgtttgccgcctccatgggcccaacagaacggactgcgactctgcgcgcacttggtgcagccttgatgttgacaccgccgaccacctccatggccacgacaccgtcctttactgacggcgatcttcttgcagccttcaaacgagcactgcttggcgccgcagcccgtgagcagagcgcgggccaacgacggcgcgatctcatctttacccaccgccgtagaagtggaagtagaggtagaggcggccggcgcctcgggcgtcgatccgcgcgtcctctttttcccgctagccacagtctccgtctcagccctgggcggcgaccgcagtcgaatctgatgcactccggggggcgacgccgacggcaccggcaccggtgcaggcggcgtcctcagccccgaattcaagatctggccgcgcgcagcccagctcctctgctcctcctcagcgtagctggagatcttcatagcttggaaggccgcttgttgctccgccgtcatgcggtccggggatggcatgccgccgtacggacgacggataggggctggaggggcttggtagtatactggctgttgctgctgtgcgtagccctgggaggctggggccgccctggggccgtccaggaacttgcccacggcgcggaacaggcgctcgcgctcgtctccttcggccacggaggacgcgcggcgcatgggcggcggcgtgacgggtctgggccgacgcgcggtctcgtccagacccgccacggacgcctgcagcagcgggaaggaccgcgccacgtccatggtgtcgacgcgcggggccggaggctgacgctgctgctgctgctgctgctgttcgagcacctgcgcggccgccatgacgagctgctcgggcgtgggcgacgcgctctggtggtgcacggtccaggccatggcgcgcgggaacaggcggtggcgcagcagcagcgcggcggcggcgtccgcgtccgggagcgcggcgtccgggttgtcggccatgagtgcgcactcaactcgcttgctcagtaggcgggcaatttcaaagtgagcgggcgttattgcctggttgagatgggaaataataatctgagcaggattttgacgaattcgtaggtaaataccgtaaaatgtagcgaataagcgtatatgagtgatggtcaaagttgcacatagaggtaggtgatgttatatcaaaaagtaccgtggaggatgcataagcaagactttggtaagacagcgttgaagtcgttgctgctgctgaaaatgcgatggcgctagaggtcaatgctgctttccctcaaagttgcaggggggcatgcctttttcctgcaggtatgtggggatgctaacgtagcgcgagcgttgagccaccaattgttattgagaatatcaacttagactgcctggtccgtctcagtcccagctgttgctgattaatgcccgctttgatcgtttacgatacgctgttgcaggtctcgtcgtttccctgataatcaagcgccaggtggccgtctcaacagcggaccaaagatgaacccggtctcagagctaaaggacctcatgcgtacggcaccaccgagagcttttcgccatgggtccgttcgctcaaaggatggcaacgcggccgaacgcgctctacgacggcccaggcggaggatcttgggacacgcttcaagggataagatgtgtgatagggtctagggtcctggtggtaccagcggcgtcgtcaagccgctcggaccgaagcgggaagagctcgacaaggtcaaggtcaagttgccgtcaggaccggtccgccacgtgtccaattgttcatttggtgcgttcggttcggggtcacgcccctgggctaatagaaaggggccggaggagctcagggtcaactcaacgactcggctcagctcgtggtgctgcctgcgttgcccgacggcgaagaaagcaaatgcctggattctggtagctctgagaaacgctggaaaggggccgcgctgcaagctgtcaccacttcgttgtcgtcgaatctaggggggtctgaagagccgggcgtgcatggagcagccgcgaacggcgcgagatgatgctaggaaaggcaaccggcagtacatgttggtaggcatcatcttgtcgaagcgttcgtgtattgtattttgcacctcgcaaaaaatgcgtctgcgtgttcgcctaagcagcacagtgcaatagtcgaaacgctctttcaccaaaaatgccatgttgaattagaaaagtacagttggagtcttttaggcggattgcggtcacccgccgggcggaccaaaggcgggtgacaccgctctttctggtcgacagcctcgttgaatttcgaggccgcagtatgcgacgtgagctcctcggtccgtctccagcgcacagccggcggcgttgaacaggatcggcgtagcgcaggcgcacgcacgtgggtaaatcttcactgcagatgaaagagggcttcgtgcaattcgatctccatcgggcacgcttcaaaagaaatcaccgttggtgaataggatgccggctgggaaatccccagtgaatcctcatttgacatgtgaagacgtagaggaaaggaaattttattgagatgtctagctatagctagcagtcgaggacctcgaggggccttcaacctcgtcgaggccgcgcaccgccttagaagaggctgtacgcgatcgccgcaagggcaccggctgcaaggcttgaaagggacatcacgctcgctgacgaggtcgaggtggtggtcgtggcgccggacgaggagctcgacgtagacgtggtcgtagtgttgccagtgctgctgtcgccgagcacggggtcatagtggagagtttctttgaaagaggtgaagacccattggaattcagtgtcgcccgctgtgtcaaccaccgatgagttcaccaatggcgtctcgacgccgtctaccattgcgtaggtcggcgtgtccatgaacatggagtcgcccatgtccacgcgctcgacgtccgaggcatcggaactaccggaatcactgcccttcgctttcttcttcggcttgcccagttttccgcccttgggtcccttcgcatccagcgtgacagcgagagtgagggtgttggcatcgtcatcgaaaggccagttggcgatgtcaaccgtgaacttgagcgagccggcgggaacggtgaggttctgggaaccgtacgacaccgccgtagtaaccgggtagatgtcggccgttaggttgaaaagcgcgccattctcctcgagtgttgtcacgaacgtcgttgagtatacggtggctccgttcacgtccttctctacgacgtcagtccagtcgctgtttttgggtttgaatttgtcgatgtggcccacctcgtcgccggcagcagttagctccgtgaggctggcgacggcgagcttcatgaatttccccgccgtgcagtctccggtcgggcagactttcatgacggcaccagttccgtcgaagtcagctgcggttttcatgtgccccgacttgccggaacccgaaccagagtgatccttgggttcgaaggacttcttggcggaggccccagaggtgtgggcgaggatgcacacgagggcgaaggcggccgggttgacgatcttcatggcttcagtggatacggcgagcgggtatcgacggtggcttgagagacagcgaaaggctgaaggcctctgggtgcttgagtggcttggttgcttgagtgcttggaagtgtttttcggaatgacaatggtcaggagagtttcgctcttccaacaaaaatgcagcaagtataacaaatcgacagcatcccgcattgggcgcgtcagacacgaaggaacccaccatgattgcagcaacgtggctattttggcaagacagcagcacgctttttaatgcttttattaaccgtaggtggctgtgtgtatcggtgctacggcacgggatcggacgctgagatactgtggccggatctatttgaaaatgaaagcatgctgcagtcgctgcagttgggcatggcgtttcagcgcgttttgctttctggttgagacaaggaaaactccgctagcggctccacactcgcagtcttatgaagcagcatgccgtcgatcgcagtgccgaggctggtgttcctgattcaggaatgctggacagtacccagccgaatctaccgaagcgatgttgaaaactgaagcaaaacatgatatatcggtaggcgactcttggccaggatccaccacctcaactcgagctagtcgaggcgtagctgctgcatgacgccgtgtgaccacaggttgaagcgagtctatccaagcgatctcaagctcgtgcccgttttgcgcgctgcgattgctgcgctcattggcgaaaaatgcttcgagtgtatcctagtggatacactcgcgacggtctctgctaagctcctcacttccagcattgtcgacacctcgacggatacagtacgcacttactccgacgagctacaccatggaccccgtcccccctgcaacgcggggccaagaccgctgcaacctggacgtgtacacgctattcggtgagtccagtgacggccccatcggcgtcgctcccgcgcgtccgcagcgtcaaccgactgcaatccaagacaaccgacttccacgcgtcacagtcgtgccgataccgacacccgaaccgaggcagcttccagtcggccgtcagtcaagggtcagcgctgtggtgttcgaagacggaactgcacgcgcgcgactgctgtcggatgagagcgacgccccgttcagcgctggctactgtcgccaattggcggccatgtacacggacgtcggcatgtcgacggtcgagcgagtgcggtggctgtgcggctggatggtcctggtctacgcgttgacgtgctgcgcgtggttcgcctggccggcatacacagttccagtcgtgggggtcctcacaggcactggaggcttgctcgcgtgccaacgcccgcacgaacggacttacttgacgtacgtgctcatgttcttggcgctgaactacgcgcagcttgtgctacttgtctggctggtcgtcattgaacttcctgcagaactgacggcgacgtgcactggaaactgcgccggggaagaaaccaaggcggtgtttatcgtgctgctggtgttggcgacggggatcttccactggcgagtggtggtgactacaagactctacgtgcgtgagttccgaatggtcgagcagcttcagatgcaggggtctcaggcgttcctcttcaacgcttcatactctcgcgctgcggcttcgtccacaatggcgacggacgttcaatcaagatcctcggctagtgttgtgtcggtgtctgttgttggagatgcagagtagcagcactcaagctattacccccaagcaacacgagtttgaagctgcaaactccctggatactggtagagcgatatgtaacttaaggctgcactttgaaatggaatggctgtgtattatccgtgtgaagcttcgtctagtgacaaaacggaagcgctggatggtatgaaacacgaaacgctatggagcaacaagagcggggagaaaggttccccaccttcgactcgcgaatctcggctgcgtccacggtttagttgcggcgcaggcgagtgtatgtggtcgtgacggccggaggagtgtaagcagagcccgacgaggcactggcagcctcactgttctggctcgccgaggtcgtggtagtagtgtacgaagtgcccgacgacgcgctagcagcctcgctgttctggctcgccgagttggatggaggggtgtagtaagtagtgcccgacgaagcgctggcatcctcactgttctggcttggggcatccgtgcagggggcatccgttgaagtcgaggccgaggcgtcctcgctgctctggctcggggcgtccgtagcaggagtgtacggggtgtacggggtgtaagcaccgccggacgaggcgctggcaccctcgctgctctggcttggggcatccgtagcaggagtgtacggggtgtacggggtgtaagcaccgccggacgaggcgctggcaccctcgctgctctggcttggggcatccgtagcaggagtgtacggggtgtacggggtgtaagcaccgccggacgaggcgctggcaccctcgctgctctggcttggggcatccgtgcagggagcgtccgttgaagtcgaggccgaggcgtcctcgctgctctggctcggggcgtccgtagcaggagtgtacggggtgtacggggtgtaagcaccgccggacgaggcgctggcaccctcgctgctctggcttggggcatccgtagcaggagtgtacggggtgtacggggtgtaagcaccgccggacgaggcgctggcaccctcgctgctctggcttggggcatccgtagcaggagtgtacggggtgtacggggtgtaagcaccgccggacgaggcgctggcaccctcgctgctctggcttggggcatccgtagcaggagtgtacggggtgtacggggtgtaagcaccgccggacgaggcgctggcaccctcgctgctctggcttggggcatccgtagcaggagtgtacggggtgtacggggtgtaagcaccgccggacgaggcgctggcaccctcgctgctctggcttggggcatccgtgcagggagcgtccgttgaagtcgaggccgaggcgtcctcgctgctctggctcggggcgtccgtagcaggagtgtacggggtgtacggggtgtaagcaccgccggacgaggcgctggcaccctcgctgctctggcttggggcatccgtgcagggagcgtccgtcgaagttgaagcgctggcctcctcactagtctgctggtaaacgggagcatccgtcgcggccgaggcttcctcactagtctgctggtacacaggagcatccgtcgcggccgatgcttcctcactggtctggtacgggggcgttgtgtaagtaggagcgtcagtccaggtcgaggcgctggcatcttcactggtctggctgggtgcgtccgtgcaaggagcctccgtggcagccgaagcagaggcctcctcactagtctgctggtacacgggggcatccgtccacgtcgaagcactcgaagtctcgctggtctggcttgcgctctcagagcaaggagcctccgtcacggccgaagcttcttcgctggtctgctggtacacgggggcatccgtcgcagcggaggccgcttcactggtctggtggtaaacgggaggcttggtgttgtacgttgggacatccgtcgaggctgaggcagcttcagagctctggctcgcgcatggggcttccgtcgcctccgaggccgaagcctcttcgctggtctggtggtacggagccttggtgttgtacgttgggacatccgtcgaggcgctggaagcttcgctctgctgccccttggagcagtcctcgctagcggtctccggagcaggcgtcacgtaaggcttctccgtggccggaggactagtgtagaccaccggggggctcgtgtagaccgccggggtaggggcctccgtgtagaccacagtcgtaggcgcctccgtgtagacaacggtcgtgggtgcctccgtctcgggggtgtccgtgtcaatcgtgataagcggaggggagaaggtgactgcctcagtctcctggtatttggttgcctccgttggctgcggcgtgtagaccttgctagggggagccggagtcggggcctcagtgaccgtgtaagtcagcggggaagtcgtgtcgaccggaggaatgtactgggtctcctcagtcacagctggagggcagggcgtcgttgccggcggcgtgtacggggcctcagtcgtcacgaccggggtatcgtacttcgtctcctcagtcacagccggagggcaaggcgtcgctgccggaggcgtgtacggcgtttccgtcgtctcgggcacgtaaggaatcttggtctccgtgtatggagtttccgtcggtgtgtacggggcctccgtcggagcttgcgtctcgggagtgtaaggggttccctcagtcacaccaggcgtgatcggcgcgggggtcttggccggaggaacgtacgtctcctcagtcacggtgggcgtcggtgggacgtaaaccgaagtcgtgggaggcgctgtcgttgccggaggcgtgtagaccgtcgtcggggcaggcgtgggcgtctccggaatgtactccgtctcctccgtcttaccaggcgtagccggaggcacgtagaccgacgtcgtggggggcgcggtggtatcaggagtaacttcgcactcgatggggacgggcgcttgcgtgtcgatcacctcggtcgactcggtcgttccctggcagtccgtgttggcgacacagccgtaggtgccttcactcaagtagacgcacgtggatccgtacgcgaggtcaccatgcacacccggacactttcccatttcgccagcgcaaaccgggcccttggtgcagtagtagccttcctggcccacgacagacactgggaaccagccatcgctaccgtcgcaatcgtccggcatgctcgagtcgtactcgcaaatgcccgtgctgccggaagtcgagcctccaggagtcgactcggtggtgccggatccgctggtgctggcgctcacactggtctgcgtctgcgtctgcgtctgcgtgtacgagccagactcggtgcttccgctcgtgctggcgctagcgctcacgctcgtctgcgtctgcgtgtacttgcccgactcagcacttccgctggcgctggtgctggtactggtcggcgtgtacgtgacggtgctggtgctgtatccagcgaggacgggggccacggcgatcgcggcgaggaggagggagacgttgaacttgaccatggttgcttaggtacaggtagctggagagctgggggagttggtaagtcgcgctttgcagaagcaggcgaattggagaatgagctgctggaagcgacttgctcggccgaggtgaggcgaggcgaggcgttcgttgctggttgcagccgttgcaggtcaactgctttgcatgtcacgagctcggaagggtcttcgaccatagctcgtttcatagttcgtttcgtagttcgtttcgactgccccttcacgccaacggctcccttggtattcggacacggcactgcagtattcagccaggcgacgtatgtgcatgtactaggcgtgctttcacgaaaaaatctggcggagctcgaaacggacggcacgcgcggggagcgtgcgtcgcaaggtgtactccggttacgcgctggggctctctaccgttcgcgaactgcctgctcccaacaaaggcattgctcttgcaggagactttgcacaagtgctccatatagtgttgatgtggaggtgtccagggggtcagataccagaaccagcagcactatgcagcaacgcgaacggtttatcagaggtttcccgttagatagatagaggcgctcgagtgacgacgtacttggctgcatggggaactaacccatcggccacgtccccgcaccagaagaggggacagccgcagccatcgtcgcccctcacgacagcctcgacgcaagtgtcttccggaggtcctgtccttccttgcccgaaacgccaaaggcgaagtgatgtaccgatacacaattatccacacgcacacaccataaaagcctgatctctataaattgggtacttttgcccaaaacatggttccgacgccctagttttggtccctttacgcaatagctcgccaagatggagcacgtgctgggcgacctggacggcaagacggacgtgctgcgcttcgtggtgggcttcctgcgcttccgcgactggcagaacctgtcgtcctgcagccgctcgctggccgcctcggacctgcggcgcttcgtgctggcgcagggcgtgctgcgcgtgcccccgccgccgctgacccgcggccgcatccgctcggacgcgctgcccgccgccagctactacgccgacagcttcctgcgccacatggagcccgacctgctgcgctgcgtcacgagcgtcaaggtgccgcgcacgggcatgcacctgctgagtctgctgcgcgtgctgccggcgctgcgctcgctgcgcttctgggactacccgtactggacgcccgaggaggacgagccccaggacgaggagcccgccatcaacgtggccgccgtgctgcagctgctgccctcgctgcaggagctcaacgtggcggacgccgacgtgaccctggcggagctgctggacatggctacacccagtcccgttgctggagtgcagcccagcggcggctggagcctgcgcgcgctggacctggcggagaccgacgtcgtggacctggcgccgctcgtggtgctgccgcagctgcagtcgctcagtgtgagacgcaccaacgtggtgacgctcgcggtgctggaggcgctgcccgagctccacgtgctggacgtgtccgagactagggtcgtggactttgcgccgctgaaggcgctgcagcagctggagacgctggacatgagcaagaactgggtgtccacggacctgagcgtgctgcagcatctcacggcgctgcggtcgctcaaggtgacgaacatcggcgcgtcggactcgctcgagttgacgctcaagtgcccagagctggagatcctgcacctgcagaacacgcggctgacggacttggagtttgtccgggagctgctgaacctcacgtacctggacattcgatggacgcacgtcggggatcgacgcccgctggcggcgttggagcagctggagcagttgttgctggacactagggaacgaggagcgccgccgacggccgaagagcaagagttaccggtgcccactgctaattatgagtggctcagcagtctgcacaagctgaagaagctgaggatgtacaagcacaactaccaggacgatatcgccgatgtgctgcgcgaagacgttgaagagaggggagccacggtcgtcgctacacgaggactcacaatccccatggcgcaccgcgtaccgagtgcgttcctgaaatatgcgagcagagagggcgcgctgaactcgctggagttgccgcctcttgtggactattcgccgctgagtttgatgtcaacaacgctacggcatctgcgactgcagcagtggtgtgcagacgacttggcacagatcgtggcgctgggcgagatgccagcactcacgaggctgtccatgtcgctgcctcctacagcacaagtcatggatctgctcccgctggagggtttcgtgcagctcaagcagctcgagctgctcgacgtgctgttcgaagacctcacacctctgggcgcgctcgtgaacctggagaagctcgtgctgtctctgcctgaccgcggcaagcggcagctcgcgcgccgtcacaaggatcaccagactaccttcgagttcctcgtaaatcttacgcagcttcaggaactatcgctggttggtcgtgtggactttaaaggcgcttcattactgtccggaatggacaagatgcggaaactgtggctgaacgcgacaaaggtggaggacgctgcgcctttggccacgctgacccgcctggagatgctcgatttgggcctcacgcccttgacgacggtggagggtatcccgaggctgctggagctggagtgcatttggatccccgaagcggtcgactgcaagacgctgcgtgacccgatcaacttcccgcggctgcactcgatctggcacccggacgactataactgcctctggacagaccacaagttttgaactaagacgcctcgcgtaagaatgtacagcaaggttcgtgtccatagtgctttcattgttgcatgagctcttgtgcacttgtgcaacttgttaaaccaacagattcgtagcgcttcgaagtggcggcacgaccctggatgagctcatgtctacatgcgtgtactcttgatgacccgagcaggtgagctgctggcagcgtgtgggtatcgaccccttgagctgtgatggaagcctaacaacatggtccacgcagcaccgacctcactctacccgatggtcttggatgatcaaggacctcctcgctcagtcgaccaccatggacagcaccacaccacttgtcaatttgcctcgtcaagggcgtaccgagatgcagtcgagcgtcttcgccctcgagttcgttggcagacccaacaccaagcaccgcgcgcgcaaggagcgcagacgcatagcaagactgcgatctgtcctgagatggcgacgcgcggagcgagatctgctgaggaagttgtcgctacaacagaagcgccttcgcctccatgtcgactctcgtcagtgtcgacctctccctgccacgcgtgacaccaacctccacgtccagcaacagctcgagccaagtcccgacgtgacggcgttcgagcccactgagcctcgcaacgacctgctgcacttcttctctggaggcggctggctcatggtctacatgtacggcgtgtgcaaggcgctgcgcgagctcaaggtggacgagcgcgccaagttcatcggcacgtccgccggctgcctggccatcgtgtcgctcgtcctcaagtcggacttcgacgagatcttcgactcggtcgtcgacgactacgtgccggccgcccacgcgagctggaggggcccgttccggatgcgcgactacctcatcgacgccgtcacgcgccacggcaacgccaacaacatccatgagctgcagggcaaggtcacaatcgtgtacacgtcgctgtcggcttgggtcgcgcgccgcgtctcgcgcttcaagaacccgctgcacctgctgcagacgatggtggcctcgtgctgcgccacgccgctggtggggctgccgttcgagctcgagggcgagtactgctggacaaccagccgctgttcgaacacggcgtccgcacgatcaccgtcacgcccaacgtcttcgtgccgccgtggtggtccatgtaccctccatcgcagcgagagatgcggtggctgtacgacctgggctacgaggacgggctgtcgtggtgtgtgcgccaggggcttccagggtcggagagcattgagttgccgaccaaggctgcgacgtacaggggcgagtggaagacggtcgttgggcaagtggtgggctaccggtcggtggaagatgcggtgctggctatggcgggactgctgctgctgtcggaggagacggtcacgagcactgtgatccgactggagatcttgctgtggaggctggtggcggttgtcgccgctctgttggagtggagcacggtgctctggacggtcttggctggagcaacgctgatggggctggcgatgctggatcagcactgcacgctgaagttcgtggtcgtgctgggggcgcacttgatcgtggcagtgttgaagctgaaggaggcttgctggcaggtccactcgtcgcctcactggcaagaactgcgagactcgctcggtgcgatggagaagcaaacgacaacgagcaaggtcggacccactccccagcaggaggcaatgctggcgaagtggtcgtatgtgtaccgattcagtagtttgttggtgtgagtacgaagacaggatggaagtggggtgcccaacacactgtcagttaactgaagttgaagtgtccgagggcaagtgatcatcaaagcttcagatcttctcaaaacttgttgctgggtacgatgtgatgccgtgttcatgttctgcgtggtacatgtatgcacctgcatcataaagaaagcggccttccacaacgtcgcgatcgggcactcaaacggattatcgagttcaaagttgaggtgcacgagggcatagtgactttcaataatattttgaacgtgtacggagcactgcacctgtggaagcgcactgcaatctaagattcatggctatcctcttctgttggcaagtccactccacattataggtggtgaacctggctcaatgtcaaccacagccacagggggtgccatcaccaccaacaatggcaggttaaacaatccgttgtccttcgcaacaccctcggcgaagtaagtatcctgtggccgtaaagcacttagtgcacgcctcccccgctgtgctcactttcgaattagctttcgaccacccactcactctccaagcatgaagactgtgtgtcctcgatcctcgcagtcgtggccctgcttgctgttgcagctctcggtgccaatggcgtgcacgtcggcgacaaccccatctcgaaccgcgcacacgaaaccaaccacttggtcactgcggaccccgtcgtggatgaaaggacctgggtcccattccgcgccctgcggtcgatggactcgcccaagcagggaccccacgacgacggcaagcacctgtcccatgaccccatgaagggctcgaaacacaactctccccaccgagctctgggcccggctcacgtgacaccagcaccaaccacgacaaccaccaaggccacgcctgccccgaccaagatgaccaagcccgaggccactccagcggcgacgacgacgacgacgaaggaaacgccttgccacacacctaccagtagcacccacaaggtggctttacctcccgccaacaagaagcctactgctcctgctacgaagcacgggaagtctggtacaagcacgacctccaacgccgttcagcgggagactcgcaatttgggcgggggcgaggccaagcagcagcttcctcccaacgaccaccacagtggtgccaagcagggggtgaagaatggagtgaagcaccagtaagccctgcagtgcccagaagatgctgacggaatcgactgacggcacatcggaatgtcggcttaccggtaggtggcggtttctttcgcattgaaggtgctgcgagtttgcattgctctttgagctcgtagagtgcgaagtgcatatacttgcgagtgccatgaaatgcctgcgttgtttgacaatcttttcccaggaagcatttgcatgggtggatcgctgctctatgggggtggctatcctatccgaaggtagctcgtgggggcccttgaaaagcctagcggatacgtgtacatgtacgtcgaggcggtggtgatgccactcatggatacacaggcggtgtgaacgctaaagagttaacgttgaagttgtggtgtccgacaagtgatcatcgtacagcttcagatctttcaaaacgtgttgctttgatgccaaacgcctgaccttacttgggtatcttgcgctgcgtggtatgcagctgcatcctaaaaaacatgacagcggtcttcaacaccgacgtgatcgagctcccaaggcttgaaagcttgagtcaagcggtgccggcctgcaggagctgtacccgaggactcaggagtactcaagcgtgaggctgtcgttgccttccgagtcggaagttccgaccgtaccagttgcagggtctctggcaccaagcggacttcaacctgcgctgcgcagatacgccgccgaagcaccattcggatatctaccgaaaagcaaccaaatgcctcctgtgtttggcgcgttccccgtgctgacctccgctctagtcgtgtgccgcgagtgtctggccatgcgcggcctgggcgaacttccccacgttgttttccgcgtcgacgcctacctggacgtctattcggggccagacgcagtcgtcaacgcctgcgagcgcggcggatccttgcggttgttgacgtacctcgctgcgcgcgactccgagtcgttctggggcaaggtggcggcttacgccgccatgcacggctgcgtgtacattctgcagtggctgtcggaccagcacgcggatcggtgcgaatggggcgtggacgtcatggacagcgccgcggggctgggccacttctccgcggtgcaatggctgcatacgcaccgcaatgacggctgcacgacgcgcgcaatggatcgtgctgcgggtcgagggtacctgtccatggtcaagtggctgcacgccaaccggtgcgaagggtgcacgactcgggccatgaacgcggcggcgctgaatggagacctgcggatggtgcagtggctgcacgagaaccggcgcgagggctgcacgacggacgccatggacttcgccgctgaaatgggccacctcaaggtggtcaagtggttgcatgagaacagagcggaagggtgcactgcgtctgccatgacgtacgcggcggagcgagggcacctggacgtggtcaagtggctgcaggagaatcggaccgagggctgcacggagtacgcgattggcctggcagcgggcaaggggcacctcgacgtggtgcagtggctggatgccaaccagcacaaggggactctgggccacgcgctacgaactgccaccatgaatgggcacatcccggtcatcaactggctgctggcatcgatcgacgacggacggcagcacgagatcttcacgcgcctcgcgctgaagctggccaagaagagcaaccagtggcgcgtaatacgctggctggaaccacaagtcgagccggacctcagcaagcggcagcgcatcctgtgaagtacttacctactcattcacaaatgaacacatacgagtcagtccgccagtcatagtgccatcgcgctgctcaagacggtgccggttttcaggagttatattagcaagcgctacgagaacagcgcagcgcatccatctagtcgctcttcttctcttcgttgtcagccacagacgagctcgaggagctgccgtagatgcggctgtagcgctggcgcaactcttctcggcggcgctcagcgtcagtctgcggcgcgggtgggatcgttgactccacaggaagcgcaggtgacgcaacgggttcttgctgctcagtcgacggaatcgggcgtttgtcttctaggtcctccgaggacgcagcaacggcagcgggctgggcagatacaggggcagcaggggcatttgttggggctgcaggcgcagcggttgccgcaggaactccggtctgtggctgtgctgcggctgctgttgttgtgctttggccctggtgcggagtcccgaactgagccgcggatgcttgcaacaccgccaactgagcatgaagcaggtcaatttggcgctgaatgctgtccggatccatggctggttgcggcatgctctgctgtgtttgcggtggcatgtggccgagcgggtgcatgccgaacggcggcatcatgccgtacgcaccaggcatcccgtagccgaacggcgcccccataccagggccaaacatcatcggcgacatgtacgggttgggatagccagcaaacgggtgaccgggtgcagcggcaggaattccggctgaaggtggcggtgcagtggctggagcatcacctgcaggagctccggtaggagtagcggggggaacaacacgtccaacaggcacaccgaatcggaagcgaggagcatctgcggcagggcgaggctgggcgtcagccgcaggcgccgctgctggtgctgcagctggcgcctggggggcattgttgttttctgctgcgggtcttgctgctcgagccgctgggccctcgggaactgcggcggggcgacgcggtcctgtcggaatggtggatcggcaagtagggcaggtctgctgtcgctgaacccacatcttgaggcagtcaacatggaaaatgtgcgaacacggcaacttcttgcacgcatcgggggtcatttcctcgcggcagataatgcacgtcctgtcggtctcttgcagctcctcctccgtcgggttcggaaagcgctcgttcagatgggcggtgatttttctgtagcggaagtacgacgcaatacgtcgctgcaggttcttgatggagatccacaggtcgcgaacgatgtgcagcggcatgccgtagtaggtgaagatgagcatgaagaaaacctggatcagttgcagtacaaacccaccgtcagcaatatgcgggtagtctgcataatacataaaaactcaacgcaccaggtatacaaccagcttcgtgacttccgacacgagttccaggtagaagagataggtgaacttgttggtccaagctccgtccatgcgagagtccaccacgtacagcacataacgcaggaacgtggctacgatcgtcaccagcaagatcaggaactaaaaaagagataacaataagaggcaggtcgttgtcagcaatgaccccaatctgatcacaaccaaacaagccagacccacctcaaatccgaagaggataaaaaccgagggtccgttctccacgactttgagcgtgcaccacaccacgaatcccgtgtctacagccgccagcatcgccatgagcccaacgagtcgcacatgagtgaggcgcgagatgacgtccgtttgctcgatctgtaacaaataacaataaaaagttagcaccttcaagtaaaaagaaaaaacaaaatgcaagaacccccgacgcacaaactcgatccgggcctgcgacagccagtggaagatcttgaggaacactagcgccgtgaacagcaccatgacgtggaacgagatctcctcgcggaagatcgtgagcgccagacacgtctccgtcacggcgtagcgcacattctcgtgcagcagctacaaataagaagcaataataaataaataatcaaataagtcactaaatgataatacaatacttaataaataaataaatagccgcctcacctccacttccgcgtcccgcagcgtcccgaggaagaagctcttgagcagccgcccgaagagcgtcgtgagcacgaggccggcgttgcccagcaccagcacgctcaccttggaggtcacgagatagatgaccgacgggtagaactgctgccgcgtcacgtacgtgtaccagatcagccccgcgcaggccgcgaggctcgcgctcgagtaaagccagaacttcatccccgggctacgtggcagaaaggattgtgcttgcttacggtaaaacgataaaaaaaatagtcagccaatcacatgtttttactcctattctggcgaatcagaagcgagatacgggcgacaagtacagtcggacctctatacaagggaacacttcaacttgaccttggtgtagccatgttgtctgaccaataagttaactattttagggtgaaagttagaagtgcaagtcggcaacaaccgggtaatggtccgacaggtccacgaggacttcgtcgcacacgcctcgcgatggagcccaatgccgcgtggccttgagttgcacgatctcggttgaagcggcgacaggttggcggtggctgcgctcgaccatgatgtagtccagccgttcggtaatgccaccggagctcggaccgtccactgcaaggctgttcgtgtgcgggtcgaagctgtacatcggcgacttgtcgtgcaactgcggctcgtggacgcccagtcggtcgagcatggcggtgtactcgccgtcaggagcttgggcgccgtccgcgtgcttgttgacgttcatgtcgcccgcgaagatcacgggctcgtccttcggcagatccagagagtccacgaactcgcgcatcagcatgagctggcagttccgcgtagctgtagcgaccggagtctcccacgcctgcagatgcgtcccaaccacgtggacggtctgggtcctctccgagcctaagctgcttctgacgggcatgcgcacctggaagtagatgatccccttgtctgcgtaccgatcttcaccggacgctatgctgccgaatgtaagctcctcacagcgtccgagtgggtacttgctcatggcgaagcagccgccatcgatcaccttcttggagccgagaagtgacacgtctccgacgaccttggtctcgtagatgtagccctgcgatttcatcccggatacgagtttctcgcgcgaagtgctgcagaacgcctcgcagaatatcacgacgtcgacgtccagcggagcgaggcaacgtggaatagctgaggcacgctgcgaggcccacggcgaaatcttctcgttgaaagacgacacgaagctgggcagcagccacacgttgtacaccatgacgcgcagcttgaaaggaataggactcctcggcaatgaagagcgaactattgggctcgcgtcctcaactggctgtggttcaggcgtcgtagctgcctctggacaagctacggcgctgtgctcatcgttgatggtgcctagctggaatactgccggcgaatacttcgtggccgtgataaattctccattgataccgagtagttgacccgcccactcaccctctacaagctgcaagaacacctgactgccgcaacgaagcggtcctgtgtgtccgtacggcgacacaagccgcaacgtcgtcttttgcgagttgcctcctgtagccatggcatgaccgcgcttcgagtctggaggagctactatacgcaccgatttgcgtaccttgtggcagtacaaatggacggcatctccgaacctcgccgctcgccaaggccccgaaaactgctcggcgttctccacgacgaactcaatccctgtctcttcattctgctgtggtttgcagacactgaggtacgacgccttgttgagctggtacttccccacgccgcctccaagagcgctgagcgcgaacaccgccgacaagggccccgtcagcgctacgcccgctactccagccgccacggccgcagccttctgcgagcccgagagcgcactgcgctttgtgagcccgacagaaagtccgcccaatgctgtcaacgcgataacgccaccgaagtgcacaagctcgtcgcaccgtgaaggcgctagggtcggcggggggacacgccacggaaaaggcagcggcagatccacgagtcctccgatgctgtcgctggtgctggccgtcgtgctggtgctggtcgagctgctcgaccgcgcgagcgttcggaacccagcttcggtcgctttgtcggtgcaaatatcctccgtgtgctgcacgatttcgctgtcgttcgactctggtcgaggcgtcacgaagtcgcggaacgtgtccgaggcgtgcacgctctcaatctccagcagtttgtgcagatagctgttgagctgcttgcggagcttgtccgccgctgccgcgcgcaccgactgcgcccggaacgcgtcccacccgagcctcgaaggcttgggcaggtgcacgcgtcgggtctgcagcgtctgctggaaggcgccctcgagcgcggcgtggaaccgctggaagtcggcgtacgagcgccgcaccagccacagcgtatgcttgcgcgggaagcgcagcgagatctcgtagctccagtgctcgttcttggtcgctggagccgccacgcgcgtgatgcccacgtcggcgtccgtcgcgagccacggcagagttttggcggcgctcagactgggaggagaagtgccggctgtgttggtggcggtggacttcgcccgcggcttccgcctccacgccttcatgtcgagctggtgagatgcgggggcgaggcgaccacggactggccgacgtagcaatgagctcctcgcctgcatcgcttccggcgtagagagtcggtccgccaacagccgatagcgccgtggtgcaaatcgtgagagatttctggaatatcgttatacgcaaagttgtgaactatgatgtattaaagtggtggcgtacttttaaacctgctacctcctatacttgatttaaacattgtcttatgtataaattcattatgagtggaaaaccgaagctgaaagatgttcatgtcgtttcattactaagcgagcgattcacggactcgatgagaacgtggcgagcatctgtgaagggtagccctggcgagcacaagcacaaagcataagggccaacgttgacggaggtgttgaccacgaaacgtgatatccggtcgagactctttagcatttatcgcctgcatggccatggcatcacggggctcgacgcttttcaagcgccgccgcaagcgcgtaatctcttgcctgtataggatagcctccgccatagagcagcgatccacccatgcaaacgcttcctgggaaaagattgtcaaacaacgcaggtatttcatggcagctttacagtactcgcaagtataatatacttgcatattatgttcttcgcactctacgactctacgagctcaaagagcaatgcaaactcgcagcaccttcaaatgcgaaagaaaccgccacctaccggtaagccgacattccgatgtgccgtcagtcgattccgtcagcatcttctgggcactgcagggcttactggtgcttcactccattcttcgccccctgcttggcaccactgtggtggtcgttgggaggaagctgctgcttggcctcgcccccgcccaaattgcgagtctcccgctgaacggcgttggaggtcgtgcttgtaccagacttcccgtgcttcgtagcaggagcagtaggcttcttgttggcgggaggtaaagccaccttgtgggtgctactggtaggtgtgtggcaaggcgtttccttcgtcgtcgtcgtcgtcgccgctggagtggcctcgggcttggtcatcttggtcggggcaggcgtggccttggtggttgtcgtggttggtgctggtgtcacgtgagccgggcccagagctcggtggggagagttgtgtttcgagcccttcatggggtcatgggacaggtgcttgccgtcgtcgtggggtccctgcttgggcgagtccatcgaccgcagggcgcggaatgggacccaggtcctttcatccacgacggggtccgcagtgaccaagtggttggtttcgtgtgcgcggttcgagatggggttgtcgccgacgtgcacgccattggcaccgagagctgcaacagcaagcagggccacgactgcgaggatcgaggacacacagtcttcatgcttggagagtgagtgggtggtcgaaagctaattcgaaagtgagcacagcgggggaggcgtgcactaagtgctttacggccacaggatacttacttcgccgagggtgttgcgaaggacaacggattgtttaacctgccattgttggtggtgatggcaccccctgtggctgtggttgacattgagccaggttcaccacctataatgtggagtggacttgccaacagaagaggatagccatgaatcttagattgcagtgcgcttccacaggtgcagtgctccgtacacgttcaaaatattattgaaagtcactatgccctcgtgcacctcaactttgaactcgataatccgtttgagtgcccgatcgcgacgttgtggaaggccgctttctttatgatgcaggtgcatacatgtaccacgcagaacatgaacacggcatcacatcgtacccagcaacaagttttgagaagaagatctgaagctttgatgatcacttgccctcggacacttcaacttcagttaactgacagtgtgttgggcaccccacttccatcctgtcttcgtactcacaccaacaaactactgaatcggtacacatacgaccacttcgccagcattgcctcctgctggggagtgggtccgaccttgctcgttgtcgtttgcttctccatcgcaccgagcgagtctcgcagttcttgccagtgaggcgacgagtggacctgccagcaagcctccttcagcttcaacactgccacgatcaagtgcgcccccagcacgaccacgaacttcagcgtgcagtgctgatccagcatcgccagccccatcagcgttgctccagccaagaccgtccagagcaccgtgctccactccaacagagcggcgacaaccgccaccagcctccacagcaagatctccagtcggatcacagtgctcgtgaccgtctcctccgacagcagcagcagtcccgccatagccagcaccgcatcttccaccgaccggtagcccaccacttgcccaacgaccgtcttccactcgcccctgtacgtcgcagccttggtcggcaactcaatgctctccgaccctggaagcccctggcgcacacaccacgacagcccgtcctcgtagcccaggtcgtacagccaccgcatctctcgctgcgatggagggtacatggaccaccacggcggcacgaagacgttgggcgtgacggtgatcgtgcggacgccgtgttcgaacagcggctggttgtccagcagtactcgccctcgagctcgaacggcagccccaccagcggcgtggcgcagcacgaggccaccatcgtctgcagcaggtgcagcgggttcttgaagcgcgagacgcggcgcgcgacccaagccgacagcgacgtgtacacgattgtgaccttgccctgcagctcatggatgttgttggcgttgccgtggcgcgtgacggcgtcgatgaggtagtcgcgcatccggaacgggcccctccagctcgcgtgggcggccggcacgtagtcgtcgacgaccgagtcgaagatctcgtcgaagtccgacttgaggacgagcgacacgatggccaggcagccggcggacgtgccgatgaacttggcgcgctcgtccaccttgagctcgcgcagcgccttgcacacgccgttcatgtagaccatgagccagccgcctccagagaagaagtgcagcaggtcgttgcgaggctcagtgggctcgaacgccgtcacgtcgggacttggctcgagctgttgctggacgtggaggttggtgtcacgcgtggcagggagaggtcgacactgacgagagtcgacatggaggcgaaggcgcttctgttgtagcgacaacttcctcagcagatctcgctccgcgcgtcgccatctcaggacagatcgcagtcttgctatgcgtctgcgctccttgcgcgcgcggtgcttggtgttgggtctgccaacgaactcgagggcgaagacgctcgactgcatctcggtacgcccttgacgaggcaaattgacaagtggtgtggtgctgtccatggtggtcgactgagcgaggaggtccttgatcatccaagaccatcgggtagagtgaggtcggtgctgcgtggaccatgttgttaggcttccatcacagctcaaggggtcgatacccacacgctgccagcagctcacctgctcgggtcatcaagagtacacgcatgtagacatgagctcatccagggtcgtgccgccacttcgaagcgctacggatctgttggtttaacaagttgcacaggagccaattgaacagtatggacacgaaccttgctgtacattaacgctagctcaaacttgtggtcggtctgtccagagagtgcatgaaataaaaacttattccaaaaacaaattattgcagttgcgtgtttaaaatatatacacaaacaattcattttcaaaagcggtatttaatagaatgcatagttattgttatataaattaaatttagttttaaataacaatacatgcaggttttgcaacgtaacataccagtattgtactaaagtttccgcgaggtgcagcggcaccaactacgaagggagttgcagagcaggtggtaagtgagaccacacgaccaacttaaccccagtcgcccctcttgctaggacaaacgggaggacaaaatcggattttacttgatttcagtatagtgtaccacaaattttgtcctatacggaccgctaggacaaaaattatggtacactatactttacatccgtgaatatcggatttgtcctagcattttttcggtttgtcctagcaaagtgcccgactggggctattatatgcgatgcttctgcacatataggcccaggcggcttcaaagttgcttttgtgtcgcgagaagaattcgacgatgatcacgtagttacatgagccagatttgaataacgcgacagttggcaggctttccctccatgcaaccgccgctcatatgtcctgcaaatatgaacttccagctgcgcacaatggaatggaacagtgctcttcatgcatttggactgacgcaaagtgatctgtagcttgcgcacgtcctgtgtgtgattcctttgtgagactgtggtgccgccaaccaagcaatcgcgagtggtctacatgtagtttagttgtgttgtcctccgggtgggcatcgttggattgaactcttattgtttgctcctttagctcgtgtttgattgctgccaagtgttcgcaatcaagcgcttttaacatgtactgtatgttccgactttgcatcaccgtctacgccaagattcgatcgcaaatcacagtacatgtaccgtatgttccgactttgcatcaccgtctacgccaagattcgatcgcaaatcacagtacatgtactgtatgttccgactttgcatcaccgtctacgccaagattcgatcgcaaaacacagtacatgtactgtatgttccgactttgcatcaccgtctacgccaagattcgatcgcaaaacattcgatggcaaagtgtagacaagttttactctcggtggtgtttaatcacacctgcaagcagggctcggagtgtcacctccccgacatgcttggcaaaggtatcagctcaaagacaatattaatttgcattgcttcactacagaatgaatcttcgcgtggtaaaaaatagtgcaaaccgctctcgagatttagagagccttgaaaatgaggcgagtgtttcggctgttttccagcgagcgcgaggcacgtctggcggacgttgaagtccatttgtcaaagatttgctcacgtcagtgagtaactttccacaacaccgagtttccggtaggggcgattcatgtaagctgccggacgttggacaactgcagtcaagttgttcagctgtggtctagcctcccttatgaactccccgaaacctcaatggcgtcaacgattcgttgtcgcagatatggataaatatcgtgacggtgccgacacatatgattttatatttagccactgtatggtggctgtggtccaatcaaatggcgatgaccgattattatcgaatgagaagggcgatagatggtattttatccaatcatcaacgttaggggtaggtgtatgagccgccgacactataatgtaggcagggctgtcgagatatgttatccacctatagcgaagttaagtaattaggtgattatacacatattttgcacggtgccgacactttactatgacattgtattgcttctgtttgcctgtttgaagcgttctgtatggcgctttcgcttgctctacaaattcaaccgagtttcgtcggtaacgcccgaaccatctctgattcatggcacaagatgttttgggcattgccgaagccgctgttgtcgctgccacttagcctcagtgagtgaggtgcggactgtgcagcgtagagagttcaaagtaggcatcaaactttaatttattcaatgttaaaataaataactacagacgtaatattcgtgcattacactgcaccaccaagcaccaccgcgctagtagaaagcgtctccccaccctgcagcggcggaggcaccaccagtagtagccgtataaccacgtcctactcctccccaagatcgccagcagcgagcgtgcctctcgtcacacccagctatcgacaactcgaagccgccggcgcaacgcgcacatccgctgcgctgctgctgctgctgttgttggctgccgtggtggcgggcggctactgctacgtctgctgcaggaggaggtggatcccttggctctccacgccgcgtgctgtctgctgctctagcctccgcatcttctccatcttgggcaccttcttcttgttcttcttgtcccgcgtgatgtccagcgtgggtggtaagacatcgtctgcgccgccgccaggcgccctccatcaatcttctcctcctagctcttgctctcggcgaacttgttgcctccgcagtcctccgcgcacttggtggccttggtctccttgctgtcctccgcgaacttaaagcccttggtcccctcgccgtcctgcgcgcacttgatccctccgccgtccttttgcgctcttggtcttctcgccgcccattcgcgctcttgaggcctctgtcgccctctgtggccttcgtcagcatgccgtccttcgtgtcctcgccccctcgctttcctccacgctattagtgttctcgccctgtgccttcagtccatcgcgcttcctgccgtgggtttcctggtcgtcctctctctcgtctggctggaggggcgcaccgccgtgccctcacactgggcgaggagagagggacagtttgctggtgatgacgagccatcacgcctgcgcatgcccgcacgccacgcacgcgtagcctggggagggggggggggcgtagcgtaggtcacggcgcatgtactgcactcagggtcgccgcagggtcgccgcccgcccgcactgaaatgggagaagtgtcaatgtagccttttagactaatcatggaatttcatcattatcaccaatgatagatcgtgtcggcaggtgtagacagatgtcggcaccgtcatggtatggaaggcagctgggttagtcaatcacggggccccctccgactaaacacgatctgcaagtgctgcaactctgtccgacgtcaacgacccgattctttgagttgaggacgcattccgctcggcaaacttccgccacaatctatgatgagaagtgatagaaattctacagcaccgaacattgccacactgctgagcatgctgtcaaggccttcactatcaagggcttttatctgggcgtagtagtcgcgattcggaagataatacatggaggtcgtatacttacctgcannnnnnnnnnnnnnnnnnnnnnnnnnnnnnnnnnnnnnnnnnnnnnnnnnnnnnnnnnnnnnnnnnnnnnnnnnnnnnnnnnnnnnnnnnnnnnnnnnnntagaagcgtctccccaccctgcagcggcggaggcaccaccagtagtagccgtataaccacgtcctactcctccccaagatcgccagcagcgagcgtgcctctcgtcacacccagctatcgacaactcgaagccgccggcgcaacgcgcacatccgctgcgctgctgctgctgctgttgttggctgccgtggtggcgggcggctactgctacgtctgctgcaggaggaggtggatcccttggctctccacgccgcgtgctgtctgctgctctagcctccgcatcttctccatcttgggcaccttcttcttgttcttcttgtcccgcgtgatgtccagcgtgggtggtaagacatcgtctgcgccgccgccaggcgccctccatcaatcttctcctcctagctcttgctctcggcgaacttgttgcctccgcagtcctccgcgcacttggtggccttggtctccttgctgtcctccgcgaacttaaagcccttggtcccctcgccgtcctgcgcgcacttgatccctccgccgtccttttgcgctcttggtcttctcgccgcccattcgcgctcttgaggcctctgtcgccctctgtggccttcgtcagcatgccgtccttcgtgtccccgccccctcgctttcctccacgctattagtgttctcgccctgtgccttcagtccatcgcgcttcctgccgtgggtttcctggtcgtcctctctctcgtctggctggaggggcgcaccgccgtgccctcacactgggcgaggagagagggacagtttgctggtgatgacgagccatcacgcctgcgcatgcccgcacgccacgcacgcgtagcctggggagggggggggggcgtagcgtaggtcacggcgcatgtactgcactcagggtcgccgcagggtcgccgcccgcccgcactgaaatgggagaagtgtcaatgtagccttttagactaatcatggaatttcatcattatcaccaatgatagatcgtgtcggcaggtgtagacagatgtcggcaccgtcatggtatggaaggcagctgggttagtcaatcacggggccccctccgactaaacacgatctgcaagtgctgcaactctgtccgacgtcaacgacccgattctttgagttgaggacgcattccgctcggcaaacttccgccacaatctatgatgagaagtgatagaaattctacagcaccgaacattgccacactgctgagcatgctgtcaaggccttcactatcaagggcttttatctgggcgtagtagtcgcgattcggaagataatacatggaggtcgtatacttacctgcaggcacacacatacacaagttcgaattagatgcaaaacctatcaaccctacaacaaaaagcacgcacagaagatgaacgggacgatgacttccgtgtactccacgaggatgacaaactccgcgacgaacaacacttgagccgtccgttggacgaatttccgacgctccttcagcgagaattttttttcgagcgtggcaaactcttcctggttcaaaggtgtgaaagcgtctgcttctgcggcaactggaagtgggtcgttcattgtcgtcaccgggaatattcgtctggtagttgcatccgtcggcattgaatcagtagtgcgtctgggtttgaatgccatgaagagaaatgtatatctgtgctgaagtagaagagcggctgtctgcggagcttcttggacaatttgcaatgctacgtcgatgaacttggcggagcgaagggggtggccatggggtattttatgctgcagagcgacgatgtctcgcattaggttgctgatatcccaaatcgacgtacaccctaggaaggcgtctagtgcgatcatttcgagcactgtggtgatagagctggagttttgaaccgagcttgagacgtacagcgcgttgaagacgtccacgttgaaaatcatgttctgcggcatcagatcgaatttcctgtcgagaaagtaggagatccagtttttggcgatgattttaatgacggggaggagaataacgtagagcttttgactcgacggtccgacatgcatgaacccgtagagatatgctgggtagacgaacgtgagcagcacttgacagatcaaaacgacaacgtagttgaccaactcgcggacgagctgcgtgtcttgcttcaaagcacgaccaaagcagcacgcgaagcaaatgatgagagcggcgaaccacaccggaatccccaccacgagtgcaaacggtagcgggaacccgatgacgctggccatgacaatcatgaatgcaatcgcgccggcgctagagatgattggcattgagatcgttttcatggagttgagcttcagaccagggacattgatccggaactgctccaagatcgcgcacgtcatgagggcgatcgatacgtagtcgcggaaccagaacaagtaattcgctcttaatccttctttaggtgcagccagagggacacaatctaccagcgcgaccacgaccaagcacggaaaaggggacaccacagcgaccagcagggcccataacgttgaagtagtttggtggtacgtagtcaggttccggacgcgttcgactgagtagttaccacgcaattctacttggaagctggtgaagaacctgagcagccgacgtccaaacagacaggcaccgcgccagcgtttgcgcatgatggggaccatgtccacggctctaggacaatttcgaatgatgtcatcgtttctcctttcgcttctatctttatcttccacgcctcgtaatctaagagagtcaaactgaggtggataatctcatttttttagcgtcggatcaacgagcatgtcatggtgactgaatcgtagcagctactctgcactacacattaatttaaaacaagcaaagaaaaacctatagcttgtgaaatgctgaacggcacctatttcttcacccacttgccgctgaagaggacagcaaaaaattcaaagtagaaatcaatagaagtaaatattaggtttttttgtcgtaaattagatccctgaacttcaattataatagtctttgtattcatattgaaatataaactatttaacatttttaatttcaaacattggttctaagacacgtataaaataatctttttaccaccaattagtttaaacgcatttttatttaaatatatattgttttcaacttttattaattgttcaaagaaacagtatgttgacgaagtaaataatgtacccatataaatggannnnnnnnnnnnnnnnnnnnnnnnnnnnnnnnnnnnnnnnnnnnnnnnnnnnnnnnnnnnnnnnnnnnnnnnnnnnnnnnnnnnnnnnnnnnnnnnnnnngcggctcgtgcgccgtgagcgccaacggcgcgtcgtacaacatgctgcagttccacatgcacgtgccgtcggagcacacgttgaacggcgagcacctgggcggcgaggtgcacttcgtgcacagcaacgcggacggctctgcgctgctggtgacgggcgtgttcttcaaggccgtgcagggcgcgagcgacccgtgggtggtctccgtgctggacgcgctggacaagacgagctcgaacgcgacagcgtcggcaagtctgacgtcgtacgccgacctggtgaacaaggccgcggacgcgcagggcgtgttcaactacgccggcagcctgacgacgcccgcgtgcagcgagatcgtggactggtgggtggtgaagaaacccgtggacgtgtcgacggccgacctggagcgtctgcagtctcagttgcgcgagctgcacatcacggacgacggcaagaacgcgcgtccggtgcagccgctgaacggccgtgtcgtgacggcgttgctgtagagttgtagcacgttcgtgtttgacaattaaatataaatgctgatacactccacgacaaaaagatatggacaccaccaaaagtggctgtaacttcgtcaatttttatcgttttaaggtgcggtttggactagagttgcaaaacacgctgataaagatctgcacgttgctaacacgcgcgcttttgcgcttcttcaggtagctcacatacaaatcactggttctgcccagttgacaaaacttatggacagctaatccccatacaaaatcctatattaaccaaaaccccttacaaatgatacgacttagactttgtatggggcgacaaaggaacccatgatttctccactctaccttagtactgagccatatatcgtcgaccaacagtttagaatggagaagacaatcgtatatccaagagatagcagcatacaaattggcactaactaggatgcaactgaacgtgcctcgcaaatcatcagataatacatggtagtcaccactcgaaatttcaatcgcttactacttgctcagttttgtgcgatggtcgatgtatttattacaggttactaaacacaccttctagtacacgataatgccatcagatctttgtctaacgtcgcgagtatcgccgtgaggctggttcctttgtcgccccatacaaagtctaagtcgtatcatttgtaaggggttttggttaatataggattttgtatggggattagctgtccataagttttgtcaactgggcagaaccagtgatttgtatgtgagctacctgaagaagcgcaaaagcgcgcgtgttagcaacgtgcagatctttatcagcgtgttttgcaactctagtccaaaccgcaccttaaaacgataaaaattgacgaagttacagccacttttggtggtgtccatatctttttgtcgtggagtgtagctttgggagcacaatcggtatggatttgagatcgatggtttgttggattgaccacacgttcttctgtaagctgaacttccaatctgaagaagcgctaacgggtagaaagtcgctgaggttgtagagcaatggaactaatgggcgcaaccacatgaacaacttagtgggtgttgggctttgcttctacaccattaaagcgcagctcgatccgggaacaaatacatacgtataacacgtcaacactgtgtcagtagggcaacgctttcccccgatgcagccgtcaccgcacgaggtaaaagcacagctaccagccgtagcaaccatgcatttatgatgcccgcccgagtcctggttcggctcttccttaatcgttgcagaagcttcaaccagcagcgtggggacactccatcgcagttcccgatgcctcgactttgagtcggtacagctactgtactgtattgatcgttcggttgcagagcgaacactgcgttgagtgctcgctgtgtaaccgaatgaacgattatgttcaccactccgcgaccggctttgtatcggggttgactacgccaagattcagattcgatcgcaaaagtccgtgctcagcaatccgaattctctctcaaacggtaaagtgtaggcatggcctgggctccgggttcaacccagcgggtttattcattgaaacaaagccgaactattccaaacaggttcctcaccgacatgcttcagtatgagttcttgctttgcgaggatttttactccacctgcgttctacggaatgaatctccacgcagcaaaaccagtacgagccgctcccgagatcgagagagcctttcgaatgaggccagcatttcggctgcttctttcgtgggcgtcatgcaataatgatgtactgcatcatatgtccgacggaagttgaagtgggtttgtcaacgatttgctcacgttagtgagtaatttcgcaatgccaagattccagcaccacaggcagttcttgtaagttaccggtatagcacaccgaccgtattaacaaatcagtgggtggctgtacgaacgttgggcagcactatagacccggttgtcatggcttgatctgtggagcatgtagttgcaatgctgtccaacgccactacgattgttgaatcaagttcgcattcccagcgcccacctggaccgtgttttttttaatgttcgcttatggagtagaagctgtttctgttgaatttcgttatgtagtagaaatgcttttattggtgtcaacacgatctactgctctgttaataatgggaacacccgaagaatgaggggtggacagctcccaacggattaattggacgcgtaagcgtaacctggcgtaaccttcgtgctacaccagccagaaggatgtcgaccgagcaggttcaacggcaactttcagctaggcagactgaggcaggaaatgcacgtcgacagacccatgcaccagcttcagaaagtgaactgcggcacgcgcgatattcatgggtgtggccccgcaggggccacgcccttgaatcacgcgggccacagttctcccttatcatggcaattagcaccgataccatcaccagcgttttataccagtggtgttcccagccaagtcgaagacgacctagttaaatctgctacagtaatgtgcgtcaataagggacctctgatatgaataggagtgtaaaggctaatagcctttatattaaggcgaacaagtggaaaaagaaagaacaatgtattgatttagttaagaagaaatgacacactgcttttactaatgagcgtggagtgcaaccagcacttcgatgatgaatggttcgattaccgatttaatgtccttctcgatttggacagatactatgtactggtactagtcgtactagataatgaaaataaaactaatccaccactgtgcgaaacaccacgccggtgcggtatgtgagacgaagttgtacatgtcgtgtgcgaaagttcgttgcgttcctttggacgaacgcgcctaagtgcttagactaccgtaattgtcgcagaacacgctcgtattctttacgaatgtcggggctggaaatccggagtagtctgcggtagtggcagcaaaatgctgaatgaatccttgaaattgccgtgggcatggggtccggttctccgtcttcgaagcagatgtagttccgttttgtccactggtggtgaagtgtagcgcaacgaagcacattccacaggcgcagaatcgcgtcttgatgactacaccagcgtttgttaactcgtaacttgtgtgggagaattagtgacgtccacgataggttgcttgtgaagaagatactccaatcttcccacatgagttgccacgtccttgttgaatgggggcattcccagaagaggtgcttcgtagtttcaatcgatgtgcagtttgggtaggggcattgctgtacgtcaggaatctgctgctttaggaaccagaatcgcgatcgcactggaagaagacgaagagcaatccgcatttgaagatcgtcatacactggtagtagcaggtggcgatggtctttgctgaattgggcgaatcgatttacgtctgcatgcgttgtcccgttaagatcgcggcagatgggatgtatgtcgggatccaacgacgggggatgaagaagttgttttagtggcgcccgagggataaacggaagcaatcttgttttagcagcttgccggacgcccacattcgggacaaagcgcaggtcgatagtaatgctgtttgtgtcaaccaacaggtctttgatgcgctcgaatatttgggtgagttcattgtacaggccttttagccatcgcttctgtcgttcctgggagaacaagggatcttgcgggtccagtgttttctctataaatcgttctcgggttggccagtacccgaattcgaggtagatatctcgtagactcccataggacttccgatgtgccagttggagtcggtaacttcgccttggttctgcaacagctataacatttcgcttcctagcggttcgcgtttcgtactgtagcagtgggtttttggagagccaaaaaggggcagcccataatgctctcatcgcgctggggtgttttccgtgagttagccactgtgttttgtgccacattagccatgtggatctccaccactcacataaggcttccattcggatcaagcatttgaaacgggtcggcgagatgtcaagaaaacatagagggtctcgtatggggatcagcggaaccaagccgcggaccgtggatgacattagggctggccatggccgctcagggctcgctaacacctcttgcgcaaattgctacaggagcaagatacgctgggcgcgtagctgcgtttctaggtgtgggatctgaagatctccagtacgtcttgactgatacagtaaggcggagggtacaagctgtacaaaacttgattcagcttcatgttttcgcgaaagcacgaatttgtttatcattcgttgccagcgttgagtgtagtctttcggaacagaggtgtgcggtgtaaaatgccagagggtcgacaagatgacggtatgcacgagaaggagccgcccgcgaatagttcttgctcttcttgcccaaacgccaaaactgcgaaaaactttagagttgagttcagcgaggatatgatctttcgtcacttgctgtccgaacgggatatccaagtatttaactgtatcggatggcttcatacaccgtacttctgaggcgaatgggcaaattgcttttcggttgaggggcatcaacgctgattttcgtagattcacctttgctccagaaccttgacagttgacctcgacaagttctgtaatgggcctactttggctcactactttagcttacacgtgtgcgcgtgtatgtgaggaagcgtagcctagtttaaattagagttaattatactcgggcctccgagtatagattaatctaaataaacgatccaaataatgtttttgggttaaaatgagaactgctatttttgttttatgtttctgacttcctctaaatgtaatattctaagataggaatctgccaacggctggttcgcagaattccattgctatgcatgtcgctcattggctaagagatgctgctctcagccaataggaatcctaagtctctatggaccacccgtcgtggtgatcgtaaatgtatgtagcctttggtgtgtctacaccaaagtcgagaaagtctttcgaacctctaacagacgtcatgtctgttagagttacaagtgactgtagccacttgtgcgtgtaaccctgttacaccatccccccctcaaggttagacgcaccgagtcacggcacgtcaatcaggaaattgaccattcgtcaattcttcacgttgggagaaagataactcgagctcattccgcaatgagctcgccgcagaagaagaccgccgccgcaacagagggtaacctctctgttgctcagtaccatgggcgccagcaggcaaagcgcgacgccctcgctgcaaaggccgcgtcggggacaacccagtcggagattgccctcgaaggttcctctgtagtcaacgacgccgttgactacgggagtgacgacgtagagatggaagagggcgaggcatcttccaacaagcgcaaggagtctatcgacagtgatagtctcgacccgcatgccgggtcgagacgccctcgtgaaggagacgactcggacgcttcaagctcgaagcgttcgcgcggcgagagcgaaactccgctctccgctgctggggctttaagctccccgcgtgaggtggcgtcttcaagttccccgcgcgctgctcaggtagcgcgcgatccgtggatgccgtctgcgtcagagatcgcagaccgtgtgggcaacaccgcgcctccaaatgaaattccgctgtacgtatgcagcgggatccacaatgatgttgtggcggaggagcagcactttgatccattaacgaatcaaaggcgcgattactatatcggactctttcacgagctccgatacttctccagcacgaagacctcttctcgcagcaaagtgcctgagtgacaggcactttgtcaaagttggaatgcttttgttaagaacttcaacaagaagccggctgcttaccgtgagcgggttaagcacgcccgtgagcgcttcgagacattctcgacgcgcgggaggctggagcagctccacagatcctctgtggacgctggtattccatgcgctgtgcccgaaggccatcagtgcacgttgtgtcttccgggtgcggtgcgcttgagcgaccgcgacctaaacgggtacacgacgattcgtgtacctgagagtctcaaggatctccgtgccaagttcttggcacgcgaggaacgcgacgatcgtgggacctcgggcgctgtaggtgaccacagcgctcgcactaccttcgcgtcggcagtgcgtggtgagtttcgtacgccctcaccatttccggaacggcctgcagcaggacgtcccgtggctcccatgtatcttggtggggcggaaaccctctccaacgaatacgataacgaaccggctgccggttcgtttttgggatactatggttcacaatacgctcaacaatccagcgtgttgagccgcgggcgtcgcggatcggaggcggcggtggtgggaacacgccctgggtatggtcaacctggggttgaccttggcccgacgctcgaggagcgggtcgctgctgtggaacagcatcagagccgggagttcgccgctctgaagcaggaggtggagatcctgagggctcaagtcgctcaggcctcgccgaccacgtcggacatctctgtcgacgtgggaggtcgcgtcgcacgcttggcccagcgcgttcacgcgctggagcagaggtttgctcccgctggggcttccgcttcgggccagccgagctacgtggctcgtgctgctggtatggcttcagccgcccgatgtaaaaggtcggatggaggcgcatgctagatggaatatctagcgtgtaggcgttgccatgccgtgccaacaccgtgaacggcccgatgaagcgcggagcgagcttgctcgccccgaagtcggaaactgcatgtttaggcaggttttgagttgctaacaaaaccaatgaacccttcttgaattcattagtgttgcccctaccaacattgtctacgttcagcttctgtcggtcgacagaagctgcgatagcgtcttggacaaaccgaatgacggcttgtctgcgctgcacgaagttgattgcgtccgagctgaactcgttcagctcgtttctagcagtaggcccggcctctgcgttcgtcttcgcggtgtctgtgccctgcacagacccgttcttcttcttgttgttgcgcgtagtcgcggctgacactgtgcaagtgtcagcggcattctgcggctgctgtgttgcagtcgtagatcctccccccacttaaggaaggagccaccatcccgagtagactcgggaggcgtgggtgcctgatggcattcacgtagaacggtgtatgcccggtcgaggcatgcaccgagttgttgatggcgaactccgccatcggtaggcactcgctccagtgttggaacgagtgagcgtagctcttaagcacgtctacgagcacgcgattcacgcgctcggtctgcccgtccgtctgcggatggtccgcagccgacatcgaaagttgactcccaagaagtgtaaaaacttcttgccaaaggtgtgcagtgaagcgcgggtcccgatccgacacaatgtcgatcggcatgccatggtgtttgaacaccatgtcaacgaacagacgcgccgtctgcttcgcagtcacttcagcgggtaccgcagcaagatgtaccatcttgctgaagcggtcaacaaagaccacaacgcccgtgttcccctggctgtccgggggaagaccgaacacgaagtccaaagacatggactgccaacactctcgtggagttggtagtgactgcaagggagcctgcgcgaaaggcgcaggcttcacacgttgacaaacctcgcaagcagggacgtacttgcgcacccatttatattggtgggcccagtagaagtctcgcgtgagaagaaggtatgtcttctcannnnnnnnnnnnnnnnnnnnnnnnnnnnnnnnnnnnnnnnnnnnnnnnnnnnnnnnnnnnnnnnnnnnnnnnnnnnnnnnnnnnnnnnnnnnnnnnnnnnnnnnnnnnnnnnnnnnnnnnnnnnnnnnnnnnnnnnnnnnnnnnnnnnnnnnnnnnnnnnnnnnnnnnnnnnnnnnnnnnnnnnnnnnnnnnnnnnnnnnnnnnnnnnnnnnnnnnnnnnnnnnnnnnnnnnnnnnnnnnnnnnnnnnnnnnnnnnnnnnnnnnnnnnnnnnnnnnnnnnnnnnnnnnnnnnnnnnnnnnnnnnnnnnnnnnnnnnnnnnnnnnnnnnnnnnnnnnnnnnnnnnnnnnnnnnnnnnnnnnnnnnnnnnnnnnnnnnnnnnnnnnnnnnnnnnnnnnnnnnnnnnnnnnnnnnnnnnnnnnnnnnnnnnnnnnnnnnnnnnnnnnnnnnnnnnnnnnnnnnnnnnnnnnnnnnnnnnnnnnnnnnnnnnnnnnnnnnnnnnnnnnnnnnnnnnnnnnnnnnnnnnnnnnnnnnnnnnnnnnnnnnnnnnnnnnnnnnnnnnnnnnnnnnnnnnnnnnnnnnnnnnnnnnnnnnnnnnnnnnnnnnnnnnnnnnnnnnnnnnnnnnnnnnnnnnnnnnnnnnnnnnnnnnnnnnnnnnnnnnnnnnnnnnnnnnnnnnnnnnnnnnnnnnnnnnnnnnnnnnnnnnnnnnnnnnnnnnnnnnnnnnnnnnnnnnnnnnnnnnnnnnnnnnnnnnnnnnnnnnnnnnnnnnnnnnnnnnnnnnnnnnnnnnnnnnnnnnnnnnnnnnnnnnnnnnnnnnnnnnnnnnnnnnnnnnnnnnnnnnnnnnnnnnnnnnnnnnnnnnnnnnnnnnnnnnnnnnnnnnnnnnnnnnnnnnnnnnnnnnnnnnnnnnnnnnnnnnnnnnnnnnnnnnnnnnnnnnnnnnnnnnnnnnnnnnnnnnnnnnnnnnnnnnnnnnnnnnnnnnnnnnnnnnnnnnnnnnnnnnnnnnnnnnnnnnnnnnnnnnnnnnnnnnnnnnnnnnnnnnnnnnnnnnnnnnnnnnnnnnnnnnnnnnnnnnnnnnnnnnnnnnnnnnnnnnnnnnnnnnnnnnnnnnnnnnnnnnnnnnnnnnnnnnnnnnnnnnnnnnnnnnnnnnnnnnnnnnnnnnnnnnnnnnnnnnnnnnnnnnnnnnnnnnnnnnnnnnnnnnnnnnnnnnnnnnnnnnnnnnnnnnnnnnnnnnnnnnnnnnnnnnnnnnnnnnnnnnnnnnnnnnnnnnnnnnatcacgcgggccacagttctcccttatcatggcaattagcaccgataccatcaccagcgttttataccagtggtgttcccagccaagtcgaagacgacctagttaaatctgctacagtaatgtgcgtcaataagggacctctgatatgaataggagtgtaaaggctaatagcctttatattaaggcgaacaagtggaaaaagaaagaacaatgtattgatttagttaagaagaaatgacacactgcttttactaatgagcgtggagtgcaaccagcacttcgatgatgaatggttcgattaccgatttaatgtccttctcgatttggacagatactatgtactggtactagtcgtactagataatgaaaataaaactaatccaccactgtgcgaaacaccacgccggtgcggtatgtgagacgaagttgtacatgtcgtgtgcgaaagttggttgcgttcctttggacgaacgcgcctaagtgcttagactaccgtaattgtcgcagaacacgctcgtattctttacgaatgtcggggctggaaatccggagtagtctgcggtagtggcagcaaaatgctgaatgaatccttgaagttgccgtgggcatggggtccggttctccgtcttcgaagcagatgtagttccgttttgtccactggtggtgaagtgtagcgcaacgaagcacattccacaggcgcagaatcgcgtcttgatgactacaccagcgtttgttaactcgtaacttgtgtgggagaattagtgacgtccacgataggttgcttgtgaagaagatactccaatcttcccacatgagttgccacgtccttgttgaatgggggcattcccagaagaggtgcttcgtagtttcaatcgatgtgcagtttgggttggggcattgctgtacgtcaggaatctgctgctttaggaaccagaatcgcgatcgcactggaagaagacgaagagcaatccgcatttgaagatcgtcatacactggtagtagcaggtggcgatggtctttgctgaattgggcgaatcgatttacgtctgcatgcgttgtcccgttaagatcgcggcagatgggatgtatgtcgggatccaacgacgggggatgaagaagttgttttagtggcgcccgagggataaacggaagcaatcttgttttagcagcttgccggacgcccacattcgggacaaagcgcaggtcgatagtaatgctgtttgtgtcaaccaacaggtctttgatgcgctcgaatatttgggtgagttcattgtacaggccttttagccatcgcttctgtcgttcctgggagaacaagggatcttgcgggtccagtgttttctctataaatcgttctcgggttggccagtacccgaattcgaggtagatatctcgtagactcccataggacttccgatgtgccagttggagtcggtaacttcgccttggttctgcaacagctataacatttcgcttcctagcggttcgcgtttcgtactgtagcagtgggtttttggagagccaaaaaggggcagcccataatgctctcatcgcgctggggtgttttccgtgagttagccactgtgttttgtgccacattagccatgtggatctccaccactcacataaggcttccattcggatcaagcatttgaaacgggtcggcgagatgtcaagaaaacatagagggtctcgtatggggatcagcggaaccaagccgcggaccgtggatgacattagggctggccatggccgctcagggctcgctaacacctcttgcgcaaattgctacaggagcaagatacgctgggcgcgtagctgcgtttctaggtgtgggatctgaagacctccagtacgtcttgactgatacagtaaggcggagggtacaagctgtacaaaacttgattcagcttcatgttttcgcgaaagcacgaatttgtttatcattcgttgccagcgttgaatgtagtctttcggaacagaggtgtgcggtgtaaaatgccagagggtcgacaagatgacggtatgcacgagaaggagccgcccgcgaatagttcttgctcttcttgcccaaacgccaaaactgcgaaaaactttagagttgagttcagcgaggatatgatctttcgtcacttgctgtccgaacgggatatccaagtatttaactgtatcggatggcttcatacaccgtacttctgaggcgaatgggcaaattgcttttcggttgaggggcatcaacgctgattttcgtagattcacctttgctccagaaccttgacagttgacctcgacaagttctgtaatgggcctactttggctcactactttagcttacacgtgtgcgcgtgtatgtgaggaagcgtagcctagtttaaattagagttaattatactcgggcctccgagtatagattaatctaaataaacgatccaaataatgtttttgggttaaaatgagaactgctatttttgttttatgtttctgacttcctctaaatgtaatattctaagataggaatctgccaacggctggttggcagaattccattgctatgcatgtcgctcattggctaagagatgctgctctcagccaataggaatcctaagtctctatggaccacccgtcgtggtgatcgtaaatgtatgtagcctttggtgtgtctacaccaaagtcgagaaagtctttcgaacctctaacagacgtcatgtctgttagagttacaagtgactgtagccacttgtgcgtgtaaccctgttacaccatccccccctcaaggttagacgcgccgagtcacggcacgtcaatcaggaaattgaccattcgtcaattcttcacgttgggagaaagataactcgagctcattccgcaatgagctcgccgcagaagaagaccgccgccgcaacagagggtaacctctctgttgctcagtaccatgggcgccagcaggcaaagcgcgacgccctcgctgcaaaggccgcgtcggggacaacccagtcggagattgtcctcgaaggttcctctgtagtcaacgccgccgttgactacgggagtgacgacgtagagatggaagagggcgaggcctcttccaacaagcggaaggagtctatcgacagtgatagtctcgacccgcatgccgggtcgagacgccctcgtgaaggagacgattcggacgcttcaagctcgaagcgttcgcgcggcgagagcgaaactccgctctccgctgctggggctttaagctccccgcgtgaggtggcgtcttcaagttccccgcgcgctgctcaggtagcgcgcgatccgtggatgccgtctgcgtcagagatcgcagaccgtgtgggcaacaccgcgcctccaaatgaaattccgctgtacgtatgcagcgggatccacaatgatgttgtggcggaggagcagcactttgatccattaacgaatcaaaggcgcgattactatatcggactctttcacgagctccgatacttctccagcacgaagacctcttctcgcagcaaagtgcctgagtgacaggcactttgtcaaagttggaatgcttttgttaagaacttcaacaagaagccggctgcttaccgtgagcgggttaagcacgcccgtgagcgcttcgagacattctcgacgcgcgggaggctggagcagctccacagatcctctgtggacgctggtattccatgcgctgtgcccgaaggccatcagtgcacgttgtgtcttccgggtgcggtgcgcttgagcgaccgcgacctaaacgggtacacgacgattcgtgtacctgagagtctcaaggatctccgtgccaagttcttggcacgcgaggaacgcgacgatcgtgggacctcgggcgctgtaggtgaccacagcgctcgcactaccttcgcgtcggcagtgcgtggtgagtttcgtacgccctcaccatttccggaacggcctgcagcaggacgtcccgtggctcccatgtatcttggtggggcggaaaccctctccaacgaatccgataacgaaccggctgccggttcgtttttgggatactatggttcacaatacgctcaacaatccagcgtgttgagccgcgggcgtcgcggatcggaggcggcggtggtgggaacacgccctgggtatggtcaacctggggttgaccttggcccgacgctcgaggagcgggtcgctgctctggaacagcatcagagccgggagttcgccgctctgaagcaggaggtggcgatcctgagggctcaagtcgctcaggcctcgcagaccgcgtcggacatctctgtcgacgtgggaggtcgcgtcgcacgcttggcccagcgcgttcacgcgctggagcagaggtttgctcccgctggggcttccgcttcgggccagccgagctacgtggctcgtgctgctggtatggcttcagccgcccgatgtaaaaggtcggatggaggcgcatgctagatggaatatctagcgtgtaggcgttgccatgccgtgccaacaccgtgaacggcccgatgaagcgcggagcgagcttgctcgccccgaagtcggaaactgcatgtttaggcaggttttgagttgctaacaaaaccaatgaacccttcttgaattcattagtgttgcccctaccaacattgtctacgttcagcttctgtcggtcgacagaagctgcgatagcgtcttggacaaaccgaatgacggcttgtctgcgctgcatgaagttgattgcgtccgagctgaactcgttcagctcgtttctagcagtaggcccggcctctgcgttcgtcttcgcggtgtctgtgccctgcacagacccgttcttcttcttcttcttgctcttgtcgacgtctgtgccctgcacagacgcgtgcttcttcttcttgttgcgcgtagtcgcggctgacactgtgcaagtgtcagcggcattctgcggctgctgtgttgcagtcgtagatcctcccccacttaaggaaggagccaccatcccgagtagactcgggaggcgtgggtgcctgatggcattcacgtagaacggtgtatgcccggtcgaggcatgcaccgagttgttgatggcgaactccgccatcggtaggcactcgctccagtgttggaacgagtgagcgtagctcttaagcacgtctacgagcacgcgattcacgcgctcggtctgcccgtccgtctgcggatggtccgcagccgacatcgaaagttgactcccaagaagtgtaaaaacttcttgccaaaggtgtgcagtgaagcgcgggtcccgatccgacacaatgtcgatcggcatgccatggtgtttgaacaccatgtcaacgaacagacgcgccgtctgcttcgcagtcacttcagcgggtaccgcagcaagatgtaccatcttgctgaagcggtcaacaaagaccacaacgcccgtgttcccctggctgtccgggggaagaccgaacacgaagtccaaagacatggactgccaacactctcgtggagttggtagtgactgcaagggagcctgcgcgaaaggcgcaggcttcacacgttgacaaacctcgcaagcagggacgtacttgcgcacccatttatattggtgggcccagtagaagtctcgcgtgagaagaaggtatgtcttctcacggcccggatgccccgcaggcggtgcatcgtgatactcatacatgatcctgagtcgcaggtcatggtcattgggcacgacaacgcggtccgcgttgtcgtcgactgcactgtagagtaataacccgtcgtgcacccggtaacggtgtgcacgagcacgaagatgcttcggcagcttctgacgagcttggtcagaaggcgctgagccgtaggccagcaagagctttgcgtccgcgtcgtgcgcggacgcgaccttcacgtcgtccaacagtgacgacgtcggggtgctcgatcgcatgacgtcaatggcattgatgtcggcatcagtcgtggtgtagtcaggtcgacgcgagagcgcgtcggccaccacattgagtcttccgggtttgtactcaacccggaagttatactctgcgaagaatgagagccatctcgccatccgttgcgagatgtgcggcgacttcacagccgtccgcaacgacgcgtggtccgtatagaccacgaacggtttgcttccgagtagatacactcggaacttcgcgagtgcgtacttcatggcaaggagctcctagtcatgtaccgggtagttgcgctcagctggcttcagctgacgcgatttgtagtagacgacacgatcacgaccctcgtgatcgtgctgcatcaacgcaatccgattgcgaagtcggatgcgtcaaacacaacgtggaatgggcgatcttggtcggccaccgccaagatcggcgcctcagtcaagccctgcttgactgcatcgaaggcctgctgacactcagcagtccaatcccactcggcgtccttcttcaggagctgtgacagcgggcgtatcatgcccgcgtagtccttcacgtacttgcacaagtacgtggccaagccaaggaactaccgcagttccttgacgttcgacggcgtcggccactcattgatcactctgaccttctcagggtcagggcggacaccgttcttcccgacgagacacccgagcacgggtatctcgctcgccacgaagatgcacttcttcaggttcgcatagagcttgtgcttgcgcatgagcgcaagcagcttccggagatgcaccctgtgcatctcaacatcgctcattccgtccgcagcccggctgtggacgaacacatcgtcgaagtagctcggtgcgaagtcgcgcaccgagcgcaacaagtgcgtcacgcacctggtgaaggtcgcaggggcgttcttcagaccctgtggcatcactagccactcccagagcatgccgctcggcgtgctcactgccgtgagagggatatcgctctcacgcatgcggatctgatagaatccatcgcacagatcaagagcactgtagatagtgctcctggccatcgaatcgatgatggcatcttttcgcggtatcggtgtctgcgccggtatcgtcgcatcgttcagcttgttgtacgcatgaacgatgcgccaaccgccctgtggcttcttgacacagaacgtcggagcactgtgtggggatttcgattcccgcacttgtccagctttgcgacgactctcaaagaagtcgtcgatcgccttgacctgctctcgtggcagtggccactgccgcgtgacacagtacttcgtccccggcacgagatcaatctcgtgctggatgccctagtcctgcggaagttccgcagggatctcttccggaagtacgtccacgtactcccgtaagatttcgtagtagggactcgtcttcaacgagtcccagctctgctcttcaaagcgctccttcttcgtcttcgcactgagagtgtcctcgctctcagtggtgctctccatgaagaactgcctcagttcttcattctcgctcttcgttctctcggcgtccgcaagaatgcatatttgctcgatgcgtccatcgtgcatgtcacgcgcgaaacgcttccagctcatgactggaagcgaagtcaactccgacgcttgcgtcggagggttagcgagtgtcatctccctgtaccggaacccggcacaggtacgcatcaagacgttcaacgtctcgacgtccggcttctcagcctccgtctgcccggccgacatttcctgtagcgtctcggccccaggccgagacttgcgcagcgcccttcgcatgcgccgtcttcttgttttgcggtgcccggctccgcttggttcttgacctcgtccaggcccagccgtggacgggtgttcttcttgtataccaccggcgggtatatcccgcgggcgagtgacttcaagcccggcttggtcgcccggcgcttcgtcgtgcagcccggctgcacgacagcatgcaagtttttccggtgcgggacgtttgcaaccgtccgcaccgcctgcagcgtcggctcccggagccgacacgccatcttcacctcgacgcctgttattggcggagccctccattacggagggtgcgtcggctccccgagccgacgaatccaattcgtccaagctatcgactcccggagtcgacggcgttacgtcaccttggcccttattattggccagacctgatccaatcagattcgcgtcagcctccacggctgaggcgtgtgactcgcctgcgtcatccgtgccccttgaggccggagactcttcctgattcgctgaaaagcgggtgtcgacctccgaggtcaacacatttccttcattagctgtcggcggcaacgccgacgctagctgctcttgcgagcgtgctcgcgcgcgcccagggcgctccgggacagcggcattaggcgctgtctcgagtggggagtcgcgcgcacctgtcggtgcgtgcgtagcggcaacagggccatcgctcactgttccgctgtcgcgaccgaagcgcacgagagtgcgcttctcccaatcgatgaccggatcatgccgtgcaagcgacggcatgcccaatacaatgtcaaacttatcgtccagatccaggacgataaaggtctcgacaaactcttgatcttcatacgtgaagcgcacgcgtaccatgcgcttctcggtctttacgatggcacccgttgccagtcgtacttccaacatacttcgaggtatctttaaatcctcgaagtcaagccttgatagacttcgcagtcgaacaaagttcttcgacgcgccagaatctaccaaagcatggagagagcggcttgctctcatcgagttcacgttcaggatgacaaggtcaggcttgtcatcttggttcttgcagtgagaatgaacctcactgggggctgnnnnnnnnnnnnnnnnnnnnnnnnnnnnnnnnnnnnnnnnnnnnnnnnnnnnnnnnnnnnnnnnnnnnnnnnnnnnnnnnnnnnnnnnnnnnnnnnnnnnaacgtctcgacgtccggcttctcagcctccgtctgcccggccgacatttcctgtagcgtctcggccccaggccgagacttgcgcagcgaccttcgcatgcgccgtcttcttgttttgcggtgcccggctccgcttggttcttgacctcgtccaggcccagccgtggacgggtgttcttcttgtataccaccggcgggtatatcccgcgggcgagtgacttcaagcccggcttggtcgcccggcgcttcgtcgtgcagcccggctgcacgacagcatgcaagtttttccggtgcgggacgtttgcaaccgtccgcaccgcctgcagcgtcggctcccggagccgacacgccatcttcacctcgacgcctgttattggcggagccctccattacggagggtgcgtcggctccccgagccgacgaatccaattcgtccaagctatcgactcccggagtcgacggcgttacgtcaccttggcccttattattggccagacctgatccaatcagattcgcgtcagcctccacggctgaggcgtgtggctcgcctgcgtcatccgtgccccttgaggccggagactcttcctgattcgctgaaaagcgggtgtcgacctccgaggtcaacacatttccttcattagctgtcggcggcaacgccgacgctagctgctcttgcgagcgtgctcgcgcgcgcccagggcgctccgggacagcggcattaggcgctgtctcgagtggggagtcgcgcgcacctgtcggtgcgtgcgtagcggcaacagggccatcgctcactgttccgctgtcgcgaccgaagcgcacgagagtgcgcttctcccaatcgatgaccggatcatgccgtgcaagcgacggcatgcccaatacaatgtcaaacttatcgtccagatccaggacgataaaggtctcgacaaactcttgatcttcatacgtgaagcgcacgcgtaccatgcgcttctcggtctttacgatggcacccgttgccagtcgtacttccaacatacttcgaggtatctttaaatcctcgaagtcaagccttgatagacttcgcagtcgaacaaagttcttcgacgcgccagaatctaccaaagcatggagagagcggcttgctctcatcgagttcacgttcaggatgacaaggtcaggcttgtcatcttggttcttgcagtgagaatgaacttcactgggggctgcagtcctcagtgtcgcgtgtccaaggtcgacacgcggaactgcattaccagtagggcgccccgcgcctactggcgtccagcgttttttgtttggttgcgacggtgcccggcaccgccgcgatagccaccctgctggtgcacgggggccgtgcactcccgagcacagtgaccgattctaccgcatcggtagcatcgcacattgtttccttgcgactgctggggtccagcagttgcagcactcgagaggtccatgggttctgggcctcccgtcctcactaccgggcgtggctgtggcctcggcacatgtgcgtgcagcttagcctgccgcaggctaaactcctcctgcattgcaagattaattgcagcttcgagagtactcgggtactcacggaagagataggtcttcacaggcccatctctcagccccttcatgaacgtgacgaccttggtcgcctcgtcgatcggattggtcacgatgttcgagaccaagtagcgtgctctctgagcgtaagcatggacatcatgcttgccctgctgcaggtcgaggaactccgtcctcgaccggaactcgttttgcgggggctcaaacgcttgtctgagctcttccttgaaaccctcgtacgtgctaaagcacgtaggatccgagagtcggcgtccatacgcccaacttcttgcacgtccgccaagacatgacatggcgaacgcgaccttcgacaaggggtcgacgatgcgtcgagccgcaatggcagtgtcgagttcgacaagccaacggaggagaggctcgccctctcttccaacgtaattgctcacgctgagcttcagcgattgcgcgcgcggtgtcgtccccgtggtagacgaagcagcatctcgctgctccctcatgatgaatcccagagcaacaccatgttgctctgtcggcgttagcgtacgcagcatcgtagctacagccgcctcaccaatgactgttgacagtcgttggagagcttcccactctgggtccgacaggtggggacagtcagcgcgtgcaacgtgagttgcaggcgtagtggagctttccatggacacctccgtatccatcgaaggttctcagctccgcgttcgtgcggtgacgtacgaactcaggtagtcgtcgttggacggactacaaagtgctaccaggtgtaatgggcctactttggctcactactttagcttacacgtgtgcgcgtgtatgtgaggaagcgtagcctagtttaaattagagctaattatactcgggcctccgagtatagattaatctaaataaacgatccaaataatgtttttgggttaaaatgaactgctatttttgttttatgtttctgacttcctctaaacgtaatattctaagataggatctgccaacggctggttggcagaattccattgctatgcatgtcgctcattggctaagagatgctgctctcagccaataggaatcctaagtctctatggaccacccgtcgtggtgatcgtaaatgtatgtagcctttggtgtgtctacaccaaagtcgagaaagtctttcgaacctctaacagacgtcatgtctgttagagttcacgaatagtttgcagtcgtacgttgctcggagtagaaattcaaaatttgtgagcgtgatgaatgttgcgaaatttggtttcctgcaggcaggatacatggtagtttgacagagttttctctatcagcacgtgtccgtttctcttgacgccattagtgatcacagtcaagatggacacattgtcccacgttaaggaggccttagtagctgtcatagaggggtccaaacactagttttggctcatcatcgctgtattccatctgcaggaccgctgtcccgttcgccaaccaaaagtctgagttgcggagttccagcagagtggtcattatctcgtgtgtccactccaatgaactcagtcgctggagcacatggcctccacactccgagcgcaacagcgccaacagtgtgttgggtgaagtaggcgcgttcctgacgctagcagccagggaacgtggctgcctgccagggtttggatccagtagtctttgtcaaacatgcggggtgctgctgctaggagcagcaattcgaaaaaggccaatgcaagtgagacatcaagtgagggagcatttatctctccttttagcgtctccatgctggccagcatcgactctcgagaggttagggcctccgcaccagtcatttttctccacttagtcgcgaaggtgtacttggcgcttggtacggatgcatttacacatcggtaccaaaggtgggtccacgccatctcatcgatcatggcggacttctgtcgcatgagtttagacagcttaatcgtgaaggcaaggcggttcttagttatctccctcagaattgcgtctgaggaaggcgacgtagtcaacaacttcgattctttcgccgcttgggcagctggaagggcttccttttcgcgttcgaactgatcgtttgattctaggatgtctttctgcatttccgggatgttctcccgcagcatggtcgcttcgggggaaagcttcactttcgatttgtccttcttgtggtagtaggcgtattcgccactcttcgttacgctctcgctcggtgcgatgctggcaacgaggatctgaaagcctagggtctcttcgtgttcctccgtgacacggcattccacttctgggtgtacatcttggaggtggctccagaaattcctggagttccacgtctctgacgacggagtaggaggcggtgcaattctcctgctctgtagtcttttcggcgggtgagcgaagtcgctttccggaaactgtgtcgggcttggaggtgccgagtgaactaactcaacaggggaatcaaacgagagatccatatcatcgatcgtgttaacttttccttcatgattctcagtctgccgggctggctgcggggtctccttctccctcgctcgtttctctccgctttgcttgttcatattgtttgggttcttgccgacttgggccactcgttgtctgccgtagagcgctccacttagctccagacagctcggcgaccgcttgctcggttggaggtgatagtactgcggtggcaagtccttacccttgactgcatacagcacgccttcaacatcaaactgggtgcacacagttcctccaacaatgagggcctttggacacgtaggtcctgccaagaagtagcgcaggatccccgaagacacctgcgttttctggctgatgtaggttgcgttgtagtaaatgggtttacatcccagtttcacaagtgctggaacactttccgtgcggtggattgactttggatccccatcacgtcgacgtagtagtcgtccgacaacgggtcgcagcgttcaaactcgaggtgccctccaagaaagctacatttctgcccctctagttgctttttggcttgcttggagtcgacttggaacatcagctgactgcgctgcagctagtgcacgtgcacgactgccttcttcgccagcacttcttgtacatacgggttgtccatgatgagatgcaggttggcaattatcttcggtctcgatagcgcttgtaggttccccgagaacgtcgccttgatgctgaagcgcgcgtctcgaacttggttcggttgcgcgttttcagctagagcgagcagttgctcggggtctgttatgcctcgctcgtaagctgcccgaatacagtcgagactgtcttcatccgctaggaggttggctggttgatcttcctgctgtgcctggaggaggtccgccagggtaggttcttcggtcggcggtccgttacgcgtcgatggtggagcctggttggggctcgcactactaggcgtggccgtggcttcggccatggtttcgtcggcgccttcatctacttcattcatcgctggaagcacgtcaggatcggggcatgcacggccgcgtggctgctgagcttgctcttgtatcgccatgacgctaggaggggagaagagggcggaagggtcgggtggtttctcggagttagcaaatcgagaagtaaaccagcacaactgaattgtagaagctgacacattatcccacgcagactcgcaccacttcatgacagttagtaagtcgcatagaagacgatcattgcaccgctgaggcaaatgccctccgcctctgcaagcatgatgaactcgacgatgttttgatcgatctgttgctggaacggagacggcttgttcttgcgctgtgacggggcacacagcacttcttaacagaggaagcaggagtatacaaactccaagtgaacagccgttcacgtgtccctggtctgaaggggacgacttgacttgaaaagcggtagatcgaagactgaatgtatttataggttggtacagatttggcctgcatacaaatcctaagttccctatagtttgtgtcatacaaaatgtgtctgttagctctgaggccacttgggtcactatccaggggagtgaccgatgtagccatcccggaatagtgacagagtcactattccatgtaaccccgttacatcctcccccacttagattcgatcttatcgaccaatcagagcgaggttacgccggcgactcacatttcactcgcaaagtcgaaatccatcgacaacggcgcgagctctggcgcctcggctcccgggcctcacagagcaactggcgcatcgccgagcaagccgcagggtctccacgtcgaccggaagcatgcctccaaagcgcagtgcgcgcagtgcgaaagcacctccgaaaccgcgggccgtagggccgaagaccagggcggccaaggccaaggacgagtcgtccgcgctgatggaggccacgaaggcggccgaggaggtggtgcgctctcgcagcagcacgccggagagtggccgtcaggccggggctcggagcaagtctcctgacgccgcgcaaggcaaggaggagagtcctcggggccataaaagcccggctcgtgactgggaagccgccgtcgttgactgcacgatggtccagtactacggtgagagttcacccgacgacgagaacgtctcggagggcagcacgcacgctgccgaaggcacggagctggcggcaggcgacatgaccaacgcctcggccgacgcaaaggcctcgtcagagaaggagacggaggacgccgagtccggctcaggcgacagcaagcagtctcacgacgaagtcgccatggccgacgctggggtcgtggccgagaagtcgtcgagcgacacgggctctgagcccaaggcggtgtcgccacccaagcatctgacgctgacacaaggtcgtgagcgtgcccaagcgtcgaaagcggctgccgctgcgaaggccgccgaggccaaggcgaagaagcgttcagcttccaggtcgcctcgcggctccagctccaagctgttcatcgactcggggtctgaggacgaggagggtgccgtccacgagcccaaggagctctccaacaacctcgacgagcagcagcagcaataccacgctgctagctcgggtgcgtatgccaggcagccgactgccacgactgccatcgagtcttcttcaggcggggatgccacgtacccgcagggctacttcccgcccgagcctggcactggtgcgccagcgctgttggagaagctctcggctcctcgtggccttatcggtgggtacacctcgaggggttcctatgagcgtgctcttgttgagaaagagccactctttcttggcgacgttgaagtcgcccggtgtgtgctactagcaccacacaagctcacactgaaggagttcaccacgcttcgcaagaagccggaggacaagggtggactccatcctgtgtggggttaccactgggtcaagacgaatgagaacatgacctggaacgaggtggaagaccgcttctggcgctacgtccagcgcaaagggtattccgaccaagagttcaaagaactccttgaggatcgcactctgaccgcaatcctggacgtgcgcgagctccgcatcgagttcgctcaacccgtgagcaagcgcaagctccactcgaagatggacgagctgaagcaagaggcgagagccaaagctcgtgaagagcgtgggcgtggtgcgactacgtctgctaccgtgccccgggtaccggccaagaagccaaggactacttacgaagctgccgctgcttctcgtcccatatcgcaacagccttcgggcagtctgcctggagctgctcaacgagctcccacgagttatccgactcagggtaacccctccacttcacgagcagctggcgcttgccatggagccgccgctcccggacgactcgttccacgtggtagtggatctgcccattacgatcaaggagggccggcggtggcctcgcacggccatggctacgagcctgaggcgacgcagccgtatgctggggccccgagtcaggtggtggccctgcagcaagaggagattcgtcttctccgggaccgtgtgtacgtcctcgagatcgcgcttggcgtcggccttggtggcgaggctgccgctcgtgctggtcagcctggtgccgtggagcggctccgtgaggatgttgcctcgctctatcaagaaactcgcagtctccatggccgtgtggatcgtcgagccgacctgtcgtcttacgactcgctgcgaaaccagctcgctggccttcgggccgagcttcatggccacgcgccgtatccggagcagcagccccactcgtatcaggcccagtttggccagggctcgtacggggcccctgcgtatgctgatccgatgtacgccgcgccgtcttacgaccagcgcgcgtatcaggcgccttaccgcgacccgacgccgcgcttcgaggagctgcgctcttctccannnnnnnnnnnnnnnnnnnnnnnnnnnnnnnnnnnnnnnnnnnnnnnnnnnnnnnnnnnnnnnnnnnnnnnnnnnnnnnnnnnnnnnnnnnnnnnnnnnntggactccatcctgtgtggggttaccactgggtcaagacgaatgagaacatgacctggaacgaggtggaagaccgcttctggcgctacgtccagcgcaaagggtattccgaccaagagttcaaagaactccttgaggatcgcactctgaccgcaatcctggacgtgcgcgagctccgcatcgagttcgctcaacccgtgagcaagcgcaagctccactcgaagatggacgagctgaagcaagaggcgagagccaaagctcgtgaagagcgtgggcgtggtgcgactacgtctgctaccgtgccccgggtaccggccaagaagccaaggactacttacgaagctgccgctgcttctcgtcccatatcgcaacagccttcgggcagtctgcctggagctgctcaacgagctcccacgagttatccgactcagggtaacccctccacttcacgagcagctggcgcttgccatggagccgccgctcccggacgactcgttccacatggtagtggatctgcccattacgatcaaggagggccggcggtggcctcgcacggccatggctacgagcctgaggcgacgcagccgtatgctggggccccgagtcaggtggtggccctgcagcaagaggagattcgtcttctccgggaccgtgtgtacgtcctcgagatcgcgcttggcgtcggccttggtggcgaggctgccgctcgtgctggtcagcctggtgccgtggagcggctccgtgaggatgttgcctcgctctatcaagaaactcgcagtctccatggccgtgtggatcgtcgagccgacctgtcgtcttacgactcgctgcgaaaccagctcgctggccttcgggccgagcttcatggccacgcgccgtatccggagcagcagccccactcgtatcaggcccagtttggccagggctcgtacggggcccctgcgtatgctgatccgatgtacgccgcgccgtcttacgaccagcgcgcgtatcaggcgccttaccgcgacccgacgccgcgcttcgaggagctgcgctcttctccaccgggccacccaccgcttcctgcggggcagccagagccagagggtcatggtacctcttaagacgacccacgtaaaacgtcgggtgagtcgtcatcgacttgggcaagtctatggtgtacgccgcgccatgctggctgaggaccgtgaagggtccaatgaagcggtgcttcagcttgttgctctcgaccgagctaacagtgtttagcggtaggtttctagtatctaggagaactaaatccccaaccttaaacacgttcatgtttcctcttccatttcggtcagagtactccttctgtttatcttgggcttgcgccatggtgtctcgcaccctgctgagtatgttcagcctgtcttcggcaaacgaggacagttgcttccgcaaggcggctggactcacgtccgagacttgggagaaaaaggttttccgagcctctcccccacttaggaccgaagccccggtactgcctcgtaatgtgagcggcacctgagggtggcgcaacccgttcaggtaaaagggcgtaaagcccgtcgatgcatgtaccgcattgttgagtgcgaactcaaccatgggcaagcgatcagcccaagagcggggcatctccgcgcagatactgcggagcgtgtcctcgagcacgcgattgacgcgctccgtctggccatccgtctgcgggtggtccgccgtcgacatcgacagccgtgtgccgggaaggcgaaacagcgtctgccagaacgtagcggtgaaccgcgggtctcgatcagagacaatggtctcggtcagaccgtgctgtcggaagacacagtccatgaacaggcgagcgacctcgtcgccagtgacggtgtcacaaactggagcaaagtggaccatcttgctcagacggcacacgaaggcaacaacaccagtgttgccaccgtcatcggccggaagtccgaagacgaagtcgagactcatcgacttccagcagcccgctgggaccggcaggctctgcaatggtgccgaggcgtgaccggcaggcttcacgcgctggcacgtctcgcacgtacggacgtaggtggcgacccacttgtacatgtgacgccaccaaaacatctgcgagacagacgcgtacgtcttctcacggccgagatggccactggatggagcgtcgtgcacctccatcaggatgtcgtacttgagatcctcgtcgttgggcacgacaatacggggaggatcctcgggctcgaccctatagtggagcaaaccgtcagcccactcatagcggtgcagccttgcacgttgtcggggcgtgagccactcggccttggcttccgagccagcggccaagaaccgcacaagagctccgagactggcatcgtctcggtaccccagcctgatgcgatcatacagatccgtcgtgacccgactaatatgagcaagctcgtagtcgggtcggcgcgacagcgcgtcggcaagcacgttcaacttgcccggcttgtactcgacacggaagttgtattccgcgaagaatgactgccaacgcgccatccgctgtgagagacgcggcgtgttgacggcagtccgcaaggacgcgtggtctgtataaacgacaaagggcgtcgagcccaggaggtgcactcggaacttgacaagagcgtacttcatggcaagtagctccttgtcgtggactggatagttccgctcggctgccttgtgctgcctggactggaacgagatgacccgttcgcggccttcatcgtcggcctgcaatagcgcacagccaattgcgtagtcagacgcatcacagactacgctgaaaggcttcgtctcgtccggcaatgccaggactggcgcgcgctgtaagttcgctttgatgccgttaaaagcatcttgatggtgacgctcccagcgccagtcgacatccttcttcaggagatccgacaagggccgtgccagctcggcgtagcctgcactatacttgtgcaggtagttggtgaggcccaaccactgtcgtaggtccttctgcgaccgaggtggcggccaagccgcgatggttttcaccttctccgggtccgcccggaccccggcgctgctgacgaagcagcccaggaccttgatctcctcagctgcgaacacacacttgtcgatgttggcgtacagcttgttcgcccgcatgacttcgaacacacgtcgaaggtgctggagatgcacctccatggccgtctggcctgcctcggcacggctgtggacgaagatgtcgtcaaagtacgtctgtgtgaacgcacgcaaaggtcggaacagttgtgtgaccaagcgattgaacgttgccggggcgttagaaagcccctgaggcatgaccagccactcccagagcataccgctcggcgtgctcacagccgtgagtgggatgtcgctctcgcgcatcaggatctggtagtatccgtcctccaggtccagcgcgctatacagcgtgcagccggccatgttgttgagcaacacgtccttgcgcggaatcggtgtctgcgcaggcactgtcgcgctgttcagcttgttataagcatgaaccagacgccacttttcgttcggtttgcgaacacagaaggtaggcgtcgagtgcggggacttcgactcccgcaccatgcctgccttcgccttggcggcaaagaaggcatcaatgacttcacactgctcccggggaagaggccattgcctcgtgacacagtacttcgtgcccggcacgagatcgatctcgtgcctgattcccctgtccggagggagattgggcggtggatctttggacaccacgtcctcgaactccttcaccaaggggtacaccgggtcccgggggttcttaagaatctcagagcccatgcgcgacgcgcgctgtctctggaactcctccaggacttcctggtccatgaccgaggacgagttcaactcggccgacgtggactccggtcggaggagaaccaactctgcgatctccccggcctttagctcggccaagaagtcctccatggcgagctcctcaaggttcagcaactctgaaacctcgggcagagctgtaagcttgacagctcctgtcttgacccgacgaccggtcacgccgtcgaagatgtgataacactcttcggcggctggagccttggctggaggctcggagtcgctggcgactggcgtcgtcggccacacgactaggcccggcttacgacgtgaccctcgggtgtcttcgtctcgtggcgccgccttgacggcaccaccgatcttctcgatctcgtgcggaactacgttacccgccttgtccttgagcggaacttggttacccgccttgttcttgagcggaacttggttacccgccttgctgggtgggactatgttacccacctcgccgagtggaacttggttacccacaccaggagcgcttccagcgactcccgcatcagttatggtctgagcgacctcctgtggaaatatgttacccacatcggaagcgcctgcagtgccttcctcatcagttacggtctgagtgacctcgcgtggaacttggttacccacgccaacgccagcggcgccttctccagcagcccttgctgcctgcggtacttcgttacccgcgtgtggacctacgttacccacctggtaggtgctgtccggcacctccactctcaggccttgtccggcccggtcggagtcgtcgtcagtctcgacgggccccaagaactcattagacgctgctgcgccctggcggccctcacgggcgccccagctgctgccagaggtgggaacatgactcaccaaagctctgtcagagcgtgggggacggctggccccgatgtccttgccgcgccagtcgatccaaggctcgtgtttctccagccacggcatgccaaggatcaagtcgtacttgtccatatctaggaccaagaacggctccgtgctgtcgaagtcctcgaacttgacagtgaggtccatgtggacccgaggtacttctaccaccgtaccgtcggccagtcttaccgagaccagcccgttgcctttgctgcctcgtagcgcatcggcgtacttgtcacgattgcgtgcgacagtctggcggcgcgcaaagttcttggacgccccagagtcgatcaagattctcaagggatgatcgtatcccggtacactcgcgtacaccacaagcagcccaccgctgcccttctccgcttcgagagtacagagactctcaggggctacgtccccatggcgtgcgccacccgcacgcccctcatgaagacttagtgtttccccagtagggcgccccgcccctactggtgtccggcgttcccctggttcctggggcgcggcttctgccagcgacccctagagccaaagggcttcgaagagaacttcttcttcagtcctcccagtcctcccgcgggacaggcacgtttcatgtgcccaagcttgccacagccgtagcagcgaatgtcgctctgctcggccatgaccagatccatgggaaccggcccgttgatcgctccattgccggagttaccattaggcgcaccgccagaggcagggttgctctgccataccgtggcgggggtacgagcctgcttgtggctgtactcctcctggagggcgatctgaatcgcctcctccatagtgtttgcttgcacacggaacagttgcgtgcgggcaggaccgacacgcagaccgtccatgaacacggtcaccttgatgtgctcaggcagggggttccccaccaaagaggcagtgagcactcgcatctcctggatgtactcatgcagctcgcgccttccttgtttgcaggcgaggaagcgcgaacgctggcggtactcgtagttcgccggaagaaacgcggcccgcagctgctcgcacagctgggaccatgatgcgaagcatccaggcgtcgtcgcttcgcgcgtatacgtccaactcttagcgcgaccactaaggttggagagcgcaaaggcgacacggagtcgctcgtccgagacgagagccgcgtccatcgcgagctcaacctctcgaacccagaagtgaaggttttctccttccttcccttcgaaggggtgaaccttcagccgcaggggcttcggttgcaccggcttcggcgcggccgcagtggcctgcagcccttgaacgtgggcgatgagccctcgctcgtaggtgtcgaacgcgttaatacgctcaacctgctcagccggcgtcgccgctgctaagctacgcagggcatctgccccaaagatgcctgccatcttccgaacggactcgtactgcgagtcgctcagatgaggaaactccgtccgatccatcttggctcactcgatgagaccacaaaggattcaggtagtccaatctacccgcgtaggcgtaggattgactacaagtgctaccaagtgtgacggggcacacagcacttcttaacagaggaagcaggagtatacaaactccaagtgaacagccgttcacgtgtccctggtctgaaggggacgacttgacttgaaaagcggtagatcgaagactgaatgtatttataggttggtacagatttggcctgcatacaaaacctaagttccctatagtttgtgtcacgatgtaagggggatacatggaatagtcacgatgtaacggggttacatggaatagtgaccctgtcactattcagggatggcttcatcggtcactcccctggatagtgacccaagtggcctaagagccaacagatacattttgtatgacacaaactatagggaacttaggttttgtatgcaggccaaatctgtaccaacctataaatacattcagtcttcgatctaccgcttttcaagtcaagtcgtccccttcagaccagggacacgtgaacggctgttcacttggagtttgtatactcctgcttcctctgttaagaagtgctgtgtgccccgtcacacttggtagcacttgtagtcaatcctacgcctacgcgggtagattggactacctgaatcctttgtggtctcatcgagtgagccaagatggatcggacggagtttcctcatctgagcgactcgcagtacgagtccgttcggaagatggcaggcatctttggggcagatgccctgcgtagcttagcagcggcgacgccggctgagcaggttgagcgtattaacgcgttcgacacctacgagcgagggctcatcgcccacgttcaagggctgcaggccactgcggccgcgccgaagccggtgcaaccgaagcccctgcggctgaaggttcaccccttcgaagggaaggaaggagaaaaccttcacttctgggttcgagaggttgagctcgcgatggacgcggctctcgtctcggacgagcgactccgtgtcgcctttgcgctctccaaccttagtggtcgcgctaagagttggacgtatacgcgcgaagcgacgacgcctggatgcttcgcatcatggtcccagctgtgcgagcagctgcgggccgcgtttcttccggcgaactacgagtaccgccagcgttcgcgcttcctcgcctgcaaacaaggaaggcgcgagctgcatgagtacatccaggagatgcgagtgctcactgcctctttggtggggaaccccctgcctgagcacatcaaggtgaccgtgttcatggacggtctgcgtgtcggtcctgcccgcacgcaactgttccgtgtgcaagcaaacactatggaggaggcgattcagatcgccctccaggaggagtacagccacaagcaggctcgtacccccgccacggtatggcagagcaaccctgcctctggcggtgcgcctaatggtaactccggcaatggagcgatcaacgggccggttcccatggatctggtcatggccgagcagagcgacattcgctgctacggctgtggcaagcttgggcacatgaaacgtgcctgtcccgcgggaggactgggaggactgaagaagaagttctcttcgaagccctttggctctaggggtcgctggcagaagccgcgccccaggaaccaggggaacgccggacaccagtaggggcggggcgccctactggggaaacactaagtcttcatgaggggcgtgcgggtggcgcacgccatggggacgtagcccctgagagtctctgtactctcgaagcggagaagggcagcggtgggctgcttgtggtgtacgcgagtgtaccgggatacgatcatcccttgagaatcttgatcgactctggggcgtccaagaactttgcgcgccgccagactgtcgcacgcaatcgtgacaagtacgccgatgcgctacgaggcagcaaaggcaacgggctggtctcggtaagactggccgacggtacggtggtagaagtacctcgggtccacatggacctcactgtcaagttcgaggacttcgacagcacggagccgttcttggtcctagatatggacaagtacgacttgatccttggcatgccgtggctggagaaacacgagccttggatcgactggcgcggcaaggacatcggggccagccgtcccccacgctctgacagagctttggtgagtcatgttcccacctctggcagcagctggggcgcccgtgagggccgccagggcgcagcagcgtctaatgagttcttggggcccgtcgagactgacgacgactccgaccgggccggacaaggcctgagagtggaggtgccggacagcacctaccaggtgggtaacgtaggtccacacgcgggtaacgaagtaccgcaggcagcaagggctgctggagaaggcgccgctggcgttggcgtgggtaaccaagttccacgcgaggtcactcagaccgtaactgatgaggaaggcactgcaggcgcttccgatgtgggtaacatatttccacaggaggtcgctcagaccataactgatgcgggagtcgctggaagcgctcctggtgtgggtaaccaagttccactcggcgaggtgggtaacatagtcccacccagcaaggcgggtaaccaagttccgctcaagaacaaggcgggtaaccaagttccgctcaaggacaaggcgggtaacgtagttccgcacgagatcgagaagatcggtggtgccgtcaaggcggcgccacgagacgaagacacccgagggtcacgtcgtaagccgggcctagtcgtgtggccgacgacgccagtcgccagcgactccgagcctccagccaaggctccagccgccgaagagtgttatcacatcttcgacggcgtgaccggtcgtcgggtcaagacaggagctgtcaagcttacagctctgcccgaggtttcagagttgctgaaccttgaggagctcgccatggaggacttcttggccgagctaaaggccggggagatcgcagagttggttctcctccgaccggagtccacgtcggccgagttgaactcgtcctcggtcatggaccaggaagtcctggaggagttccagagacagcgcgcgtcgcgcatgggctctgagattcttaagaacccccgggacccggtgtaccccttggtgaaggagttcgaggacgtggtgtccaaagatccaccgcccaatctccctccggacaggggaatcaggcacgagatcgatctcgtgccgggcacgaagtactgtgtcacgaggcaatggcctcttccccgggagcagtgtgaagtcattgatgccttctttgccgccaaggcgaaggcaggcatggtgcgggagtcgaagtccccgcactcgacgcctaccttctgtgttcgcaaaccgaacgaaaagtggcgtctggttcatgcttataacaagctgaacagcgcgacagtgcctgcgcagacaccgattccgcgcaaggacgtgttgctcaacaacatggccggctgcacgctgtatagcgcgctggacctggaggacggatactaccagatcctgatgcgcgagagcgacatcccactcacggctgtgagcacgccgagcggtatgctctgggagtggctggtcatgcctcaggggctttctaacgccccggcaacgttcaatcgcttggtcacacaactgttccgacctttgcgtgcgttcacacagacgtagtttgacgacatcttcgtccacagccgtgccgaggcaggccagacggccatggaggtgcatctccagcaccttcgacgtgtgttcgaagtcatgcgggcgaacaagctgtacgccaacatcgacaagtgtgtgttcgcagctgaggagatcaaggtcctgggctgcttcgtcagcagcgccggggtccgggcggacccggagaaggtgaaaaccatcgcggcttggccgccacctcggtcgcagaaggacctacgacagtggttgggcctcgccaactacctgcacaagtatagtgcaggctacgccgagctggcacggcccttgtcggatctcctgaagaaggatgtcgactggcgctgggagcgtcaccatcaagatgcttttaacggcatcaaagcgaacttacagcgcgcgccagtcctggcattgccggacgagacgaagcctttcagcgtagtctgtgatgcgtctgactacgcaattggctgtgcgctattgcaggccgacgatgaaggccgcgaacgggtcatctcgttccagtccaggcagcacaaggcagccgagcggaactatccagtccacgacaaggagctacttgccatgaagtacgctcttgtcaagttccgagtgcacctcctgggctcgacgccctttgtcgtttatacagaccacgcgtccttgcggactgccgtcaacacgccgcatctctcacagcggatggcgcgttggcagtcattcttcgcggaatacaacttccgtgtcgagtacaagccgggcaagttgaacgtgcttgccgacgcgctgtcgcgccgacccgactacgagcttgctcatattagtcgggtcacgacggatctgtatgatcgcatcaggctggggtaccgagacgatgccagtctcggagctcttgtgcggttcttggccgctggctcggaagccaaggccgagtggctcacgccccgacaacgtgcaaggctgcaccgctatgagtgggctgacggtttgctccactatagggtcgagcccgaggatcctccccgtattgtcgtgcccaacgacgaggatctcaagtacgacatcctgatggaggtgcacgacgctccatccagtggccatctcggccgtgagaagacgtacgcgtctgtctcgcagatgttttggtggcgtcacatgtacaagtgggtcgccacctacgtccgtacgtgcgagacgtgccagcgcgtgaagcctgccggtcacgcctcggcaccattgcagagcctgccggtcccagcgggctgctggaagtcgatgagtctcgacttcgtcttcggacttccggccgatgacggtggcaacactggtgttgttgccttcgtgtgccgtctgagcaagatggtccactttgctccagtttgtgacaccgtcactggcgacgaggtcgctcgcctgttcatggactgtgtcttccgacagcacggtctgaccgagaccattgtctctgatcgagacccgcggttcaccgctacgttctggcagacgctgtttcgccttcccggcacacggctgtcgatgtcgacggcggaccacccgcagacggatggccagacggagcgcgtcaatcgcgtgctcgaggacacgctccgcagtatctgcgcggagatgccccgctcttgggctgatcgcttgcccatggttgagttcgcactcaacaatgcggtacatgcatcgacgggctttacgcccttttacctgaacgggttgcgccaccctcaggtgccgctcacattacgaggcagtaccggggcttcggtcctaagtgggggagaggctcggaaaacctttttctcccaagtctcggacgtgagtccagccgccttgcggaagcaactgtcctcgtttgccgaagacaggctgaacatactcagcagggtgcgagacaccatggcgcaagcccaagataaacagaaggagtactctgaccgaaatggaagaggaaacatgaacgtgtttaaggttggggatttagttctcctagatactagaaacctaccgctaaacactgttagctcggtcgagagcaacaagctgaagcaccgcttcattggacccttcacggtcctcagccagcatggcgcggcgtacaccatagacttgcccaagtcgatgacgactcacccgacgttttacgtgggtcgtcttaagaggtaccatgaccctctggctctggctgccccgcaggaagcggtgggtggcccggtggagaagagcgcagctcctcgaagcgcggcgtcgggtcgcggtaaggcgcctgatacgcgcgctggtcgtaagacggcgcggcgtacatcggatcagcatacgcaggggccccgtacgagccctggccaaactgggcctgatacgagtggggctgctgctccggatacggcgcgtggccatgaagctcggcccgaaggccagcgagctggtttcgcagcgagtcgtaagacgacaggtcggctcgacgatccacacggccatggagactgcgagtttcttgatagagcgaggcaacatcctcacggagccgctccacggcaccaggctgaccagcacgagcggcagcctcgccaccaaggccgacgccaagcgcgatctcgaggacgtacacacggtcccggagaagacgaatctcctcttgctgcagggccaccacctgactcggggccccagcatacggctgcgtcgcctcaggctcgtagccatggccgtgcgaggccaccgccggccctccttgatcgtaatgggcagatccactaccacgtggaacgagtcgtccgggagcggcggctccatggcaagcgccagctgctcgtgaagtggaggggttaccctgagtcggataactcgtgggagctcgttgagcagctccaggcagactgcccgaaggctgttgcgatatgggacgagaagcagcggcagcttcgtaagtagtccttggcttcttggccggtacccggggcacggtagcagacgtagtcgcaccacgcccacgctcttcacgagctttggctctcgcctcttgcttcagctcgtccatcttcgagtggagcttgcgcttgctcacgggttgagcgaactcgatgcggagctcgcgcacgtccaggattgcggtcagagtgcgatcctcaaggagttctttgaactcttggtcggaataccctttgcgctggacgtagcgccagaagcggtcttccacctcgttccaggtcatgttctcattcgtcttgacccagtggtaaccccacacaggatggagtccacccttgtcctccggcttcttgcgaagcgtggtgaactccttcagtgtgagcttgtgtggtgctagtagcacacaccgggcgacttcaacgtcgccaagaaagagtggctctttctcaacaagagcacgctcataggaacccctcgaggtgtacccaccgataaggccacgaggagccgagagcttctccaacagcgctggcgcaccagtgccaggctcgggcgggaagtagccctgcgggtacgtggcatccccgcctgaagaagactcgatggcagtcgtggcagtcggctgcctggcatacgcacccgagctagcagcgtggtattgctgctgctgctcgtcgaggttgttggagagctccttgggctcgtggacggcaccctcctcgtcctcagaccccgagtcgatgaacagcttggagctggagccgcgaggcgacctggaagctgaacgcttcttcgccttggcctcggcggccttcgcagcggcagccgctttcgacgcttgggcacgctcacgaccttgtgtcagcgtcagatgcttgggtggcgacaccgccttgggctcagagcccgtgtcgctcgacgacttctcggccacgaccccagcgtcggccatggcgacttcgtcgtgagactgcttgctgtcgcctgagccggactcggcgtcctccgtctccttctctgacgaggcctttgcgtcggccgaggcgttggtcatgtcgcctgccgccagctccgtgccttcggcagcgtgcgtgctgccctccgagacgttctcgtcgtcgggtgaactctcaccgtagtactggaccatcgtgcagtcaacgacggcggcttcccagtcacgagccgggcttttatggccccgaggactctcctccttgccttgcgcggcgtcaggagacttgctccgagccccggcctgacggccactctccggcgtgctgctgcgagagcgcaccacctcctcggccgccttcgtggcctccatcagcgcggacgactcgtccttggccttggccgccctggtcttcggccctacggcccgcggtttcggaggtgctttcgcactgcgcgcactgcgctttggaggcatgcttccggtcgacgtggagaccctgcggcttgctcggcgatgcgccagttgctctgtgaggcccgggagccgaggcgccagagctcgcgccgttgtcgatggatttcgactttgcgagtgaaatgtgagtcgccggcgtaacctcgctctgattggtcgataagatcgaatctaagtgggggaggatgtaacggggttacatggaatagtgactctgtcactattccgggatggctacatcggtcactcccctggatagtgacccaagtggcctcagagctaacagacacattttgtatgacacaaactatagggaacttaggatttgtatgcaggccaaatctgtaccaacctataaatacattcagtcttagatctaccgcttttcaagtcaagtcgtccccttcagaccagagacacgtgaacggctgttcacttggagtttgtatactcctgcttcctctgttaagaagtactgtgtgccccgtcacacggtggcttcggccatggtttcgtcggcgccttcatctacttcattcaccgctggaagcacgtcaggatcggggcgcgagaagcctgcacggccgcgtggctgctgagcttgctcttgcatcgccatgacgctaggaggggagaagagggcggaagggtcgggtggtttctcggagttagcaaatcgagaagtaaaccagcacttctgaatcgtagaagctgacacattatcccacgcagactcgcaccacttcatggcagttagtaagtcgcatagaagacgatcattgcaccgctgaggcaaatgccctccgcctctgcaagcatgatgaactcgacgatgttttgatcgatctgtagctggaacggagacggcttgttcttgcgctgagcactttcgtgaggctggagcaacagcgcgatacgccccgagatgatgcggccgatggtggcattcccaggggggcctttgcagaccgaactcgactttggcccaaagggccaggtcttcatacttgacagcggtggagctctcagccttcttgatcagacgcagcttctgctgctgggtgaggcgagttctagtcttggaggaggagctcatgaggtgggtggatgggtagggcgctggtgttgtggtagattccgttgtgcttggagatcgcgctgagcgggttggagggaaggagttatgttcgcgcccgaattcaaatggtagcttcaatcactgattggctagatctgacctcactagccaatcacgtagtcgcgctcgttgcgaaaccaaccaatagcgccaggatcctgtcgaaagttaacttaaatcaatgttagctgtgttcttttgactgacagctatataatgtatgtaaggatattagttgccacacgtcccttattgacgcacattactgtaacacatacgtcgagcatcgacccaattgacaaacagttaatacagaactttcgaagttctgtatttactatttcagtcgaaagcatcagaaaaaaattaattggggaatttaaacatgttcatagccatattcacaaaacataaacaaaaaatacagcatgatccactcctcaaacccaaattctaagcagtgaacatttactgttaatacaactcccacactagttaatcgagacagttagaaactaatacaaagctagttctgaaaatgtgtacatatttatttcatcacgagctgttcccgttcgagtaccaaacaaacacctacactacagcaacgccgtcacgacacggccgttcagcggctgcaccggacgcgcgttcttgccgtcgtccgtgatgtgcagctcgcgcaactgagactgcagacgctccaggtcggccgtcgacacgtccacgggtttcttcaccacccaccagtccacgatctcgctgcacgcgggcgtcgtcaggctgccggcgtagttgaacacgccctgcgcgtccgcggccttgttcaccaggtcggcgtacgacgtcagacttgccgacgctgtcgcgttcgagctcatcttgtccagcgcgtccagcacggagaccacccacgggtcgctcgcgccctgcacggccttgaagaacacgcccgtcaccagcagcgcagagctgtccgcgttgctgtgcacgaagtgcacctcgccgcccaggtgctcgccgttcaacgtgtgctccgacggcacgtgcatgtggaactgcagcatgttgtacgacgcgccgttggcgctcacggcgcacgagccgccgttcacgctggccgtgaaggactcgtccgactgcgagacatcgaagtcggcgcacgagccgctgaaggtcagcgagcgcttctcggagacgttgtctagctccgtcgtctcgatatcgatgggcgactggcgctgaccgccgcacgtcgggtagtgctcggcccattggttgggtgcagccatgctggtgtcgctgggcttgtatccccacttggctccctcggctccgtcggcgttgacagaggtagcagtgagagcgcaggcggcgatggcggcagcggcgaagatcttcattgtagcgagagttgatgaaggtggtgttggtgcgttgaaggcaaaattgaaactgagctgatacatgtacgccggaggatgctgtggataccaaccagtggcttgacgtcagatagaggccatagcattgtcgtaagtaaatttaatcttgcgccgttaattaatctgtacggaagcaactctccgcaggccacgactacagtatcaaacactgaccgacgaatccacatgctgcgtcctatgcttagagtgatttggacggaactccgctacacacgctgccgatcgtctagccgctacatttcaaatcgatccaacttcaaggtcgtatcctctaaaagcaggagctcagctcatcacatctcgattccgagagagtttggctggctagggcttgcagaggaagaccccaactcaagagaattgcgcgaccatctccaatagagcctccaggatactcctcgtacaccttccggagccgctcaaactgtacatgcccaccgtcgtcaatacggcgtttcgcgcaacaggaaggcaaagcacgacaaaaactacagcgacagcacgcgctggggtcttggcccaagacacaagacttgggggcccgcaggtactgtagttgctgtcgcaagccacaaaaccacgtggaaaaggttgcgtcagtgctgtcgtcgaaaacgttgcaggtgacccaatacatgtacattttatctggacctacctgagagatttgaagcaaggacctcggacaccgcacgcattgaattttttaatcctacagtcgaacaagaattcacttgttgtgtttcaagacgagtccatgtggcacccaacgccccgaaaaccgctaacgttaggttgctttcgtcacttttgctacgtacttcaatcggcgttctttgtttcttgacaaggaatgtttcattttatatagaaatgctattttactaaaactattataaacattttatgtcaaagaccaatacatttaattgcatttaaactgagtcaaccctactgtttcatttatatgggtacattatttacttcgtcaacatactgtttctttgaacaattaataaaagttgaaaacaatatatatttaaataaaaactaattggtggtaaaaagattattttatacgtgtcttagaaccaatgtttgaaattaaaaatgttaaatagtttatatttcaatatgaatacaaagactattataattgaagttcagggatctaatttacgacaaaaaaaacctaatatttgcttctattgatttctactttgaattttttgctgtcctcttcagcggcaagtgggtgaagaaataggtgccgttcagcatttcacaagctataggtttttctttgcttgttttaaattgatgttagcgcagagtagctgctacgattcagtcaccatgacatgctcgttgatccgacgctaaaaaaatgagattatccacctcagtttgactctcttagattacgaggcgtggaagataaagatagaagcgaaaggagaaacgatgacatcattcgaaattgtcctagagccgcggacatggtccccaccatgcgcaaacgctggcgcggtgcctgtctgtttggacgtcggctgctcaggttcttcaccagcttccaagtagaattgcgtggtaactactcagtcgaacgcgtccggaacctgactacgtaccaccaaactacttcaacgttatgggccctgctgatcgctgtggtgtccccttttccgtgcttggtcgtggtcgcgctggtagattgtgtccctctggctgcacctaaagaaggattaagagcgaattacttgttctggttccgcgactacgtatcgatcgccctcatgacgtgcgcgatcttggagcagttccggatcaatgtccctggtctgaagatcaactccatgaaaacgatctcaatgccaatcatctctagcgccggcgcgattgcattcatgattgtcatggccagcgtcatcgggttcccgctaccgtttgcactcgtggtggggattccggtgtggttcgccgctctcatcatttgcttcgcgtgctgctttggtcgtgctttgaagcaagacacgcagctcgtccgcgagttggtcaactacgttgtcgttttgatctgtcaagtgctgctcacgttcgtctacccagcatatctctacgggttcatgcatgtcggaccgtcgagtcaaaagctctacgttattctcctccccgtcattaaaatcatcgccaaaaactggatctcctactttctcgacaggaaattcgatctgatgccgcagaacatgattttcaacgtggacgtcttcaacgcgctgtacgtctcaagctcggttcaaaactccagctctatcaccacagtgctcgaaatgatcgcactagacgccttcctagggtgtacgtcaatttgggatatcagcaacctaatgcgagacatcgtcgctctgcagcataaaataccccatggccacccccttcgctccgccaagttcatcgacgtagcattgcaaattgtccaagaagctccgcagacagccgctcttctagttcagcacagatatacatttctcttcatggcattcaaacccagacgcactactgattcaatgccgacggatgcaactaccagacgaatattcccggtgacgacaatgaacgacccacttccagttgccgcagatgcagacgctttcacacctttgaaccaggaagagtttgccacgctcgaaaaaaaattctcgctgaaggagcgtcggaaattcgtccaacggacggctcaagtgttgttcgtcgcggagtttgtcatcctcgtggagtacacggaagtcatcgtcccgttcatcttctgtgcgtactttttgttgtagggttgacaggttttgcatctaattcgaacttgtgtatgtgtgtgcctgcaggtatgtatacgacctccatgtattatcttccgaatcgcgactactacgcccagataaaagcccttgatagtgaaggccttggcagcatgctcagcggtgtggcaatgttcggtgctgtagaatttctatcacttctcatcataggctacctcgtccagcggaagattagcttctccacgcttcacttgctttcgttcgtgctcgactgcgggtggcgactcgtccagtccaacttgttcttgtggatcttttacacgataacaaactcgctggagcacaacggtaggggtaccagggatgatcaagcactgggaggttgtgtggctattgactgggtttttccgttgcttcaggtgccgactttagctggtcgttcagctggctcaaagacggcccaacccacatggactgatcacgtatgtacatgtacaagacccagtgtatgaattgaatgaatactcgctacagtgtacagtgtggcaaaatccgtgctcgtttccaccttttagcggtttctgctcgagcgaacgaggcacttatcgcgcaattcattggcaagcacggacgccttgggccgagggacttccagaatgctttttacctctccgtcgctcagagcttcggcgtaaatgtccatcagataccgcggcaataagggcgcttcgcctagaccgtgcagctcggcaaataagcaccaaaccatcggtgccaccactctgtagtccttcatgagaatcagcccttcgcgtgccgtgtcaggtcggccaggagcgtcgtgagccagcatcttccgccaagcagggtgaagcaggttttcgttgctaatgggacctggttcaggccctccgcgggcaacgaagtccacccaccgagccatccacttcgcgtcgatgcagaaccaacactcgcgccgttttaaaacagttttatcgtagtgcatcaccaggcccagttcaaatttgcggcgcttgtcaaagtcttcgtggaaaacagggagcgtcggggcacgccgcatgccagtggagcgtggcacactggactgctgctgctgctggcggcgaggtaggcgaaatacaattgtgcgcggcaggtgaccgagctccccaagtctcgtccgcacatcattcagtgtcgcgtccgagaaatccttgccattgatgcggacaatcactgatccaggaacgatatctccgttacgctcaagcgctcccttagagccatcgcgcaacttgacaaagcccatcacaacggcgcagtcgagcactccaccgtccagattcagccccagcggaccaggaggagctacagcggtaacgtactcagcgtcatcgtcttcttcaatcgagtcgtctcggtcgaactggtttgtctgcgccatgagcgatgcagcaatagtgccggacgacacgttggacgccatggacaacggtacaggtgacggttgttgcgacttctgcggagacagtgtttcaggctgctcaggggaagaggagctgaccgttctagccgcagctcgagcgggcttccaactcgcttctttggagccgccttggccccatgttcccatgtcttgatcactttcgtcttcacttgaatcgtcgctatcaaagtgacgcgtctctgctagagcggccatggtgccgaaagacagctccttcggtatcggcggaggggcatcgtcaatctccagggccaatcgtttcggctgctcggatgacggcgtcgactgctccgtcaaatcaggaggcgtaaactcctgcactgccagacgtgactcctccagcggcatttgctgcggtttctctggggaggccgagctcacactgctcgtcagtggcgtactcgacgatgcgtcgatgttggaccccgtcagcgtccagctcgtactcccgtcgctcacctgatcctccgccacacgcgcagccgaggccagcaccacgtccccaaccaccgtcgcttctgtcacgtggatctcctggaaagagtctccagtcgacgacgaggacccgctgccagacacaaccatattctcctcgtccttctcttcttcttcttctcctccttcgtcttcaaactcttcttcgttttcctcgtcttcttctcgtggcggaggtcctcggtgaggcgcaaactgctgactcaacggcaagtgcctgtagctgccgctgtcattgtcaataatctgctgctgcatctgctgcttcttcactggaacctgaatgttctcctccttctcgtcgtcttcatcatcatcatcttttccttcatcatcatcatcatcatcttcttcttcttcttcttcttcttcttcttcttctttgggcggcggccccctcctcggagcgaactgctgactcaatggcacgtcgctggcgtcctccagctccagtggcacgcggaacttgagcgtgcgtggcaggtggctcgtctcacgcagcacctgccccacctcctggaagcccagatcctccgccgcgaagtcgtactcgttcacggccagcaagaggctgcccacgggcacgcgaccgctcgtctccacggcgccgcgttgctctgggcgcgacggcgacacgggcgcgaagccatcgagcacggggcggtccaggtcgtcggcgtccagcatgatgcccagcggcccggcgggcacctccaccgccaccacggcgtggcgcctctcgccgagcagccagcgcgcactcgtcgccatgagcctttcacggtatcaactcgaatcgactaatgccgcctctgcctgatttgggtttttgatgtcactcaagcgaatacctagagtaatatatggtgtcattgaagtgaacacacttcaacttgtaacttgagtcggcttggtagtaattcgcgaggccagtagaatatagtactatagtactactacttctactatagtaaccagtaacttgacactttctgattgtactatcactatagtaaccagtaactcatccacgcccccaataatactatcgagttactgctgaggttcacctgaggttcacaacttgaaatgacacatacgttcgctcgcgaacccctcgcctgctgagtctatcccagagcccaaagctccactcgggtttaatcgcggtgagtaaatggtgagtgttgattgcaatagtttagcaccgccgctggtacgcaagttgctgctcagcataataggaaaaaatgtcgtaagcccctgtgctcgttcgacggcggtaagaagtactgggtctacatattttggtgttggtacatcgcgagattttgtatctactacttacaacgcacgtccgtttgcgaccagatgttctcacatgtcaaccatcaacgaagtcacacccttaaataatataaaatatttaaacaatttgaccatttcgtgacaacctgccgaaaaatatacttaaacataagtgtgtggaccacattcagccagtagtttgatagtactatagtactattactatagtagctaggaacgcttgagcaaaaggacccagtaactagtaattcgttttcttttactggaatactactggtagtagttcaggagaactaccgctactatcaagccctggtcatgactcttacgaagtattactggtcattcagtgttgtttggattgagtacatggagtacggaattgagtgacagacagcaggagcctacggtactagtcctccttgagcagcgcgtgggtgcgcgtctgcttgaagctcttcatggcctgcgacgtcttggagacgcggatgaaccagtccacgaaccacatgggcatgatggtggccacgaactccatggccatcaggatggatggcaccagcacgcgccactggttgcggcgcacggccttgacgatctggtcgaccacgaactcgggcgtgagccaccgcgtgaacggcggcggcttgacgccctcaaacatgcccgtcgtgatgaagcccggacacacgacggtcgtgtgcacgccgaagaggcccatggcctgcagctcctggcgcagactgagcatgagcccgatggccgcgaacttgctggccccgtagtccaccatcccgggggacccgaagatcccggcggcgctggccaccgacacgatgtggcccttgttgcgcttggccatcatgggcaggaacgccttgatggtccagaagtgcgatgtggcgttcacggccatggtgcgctcgatcatggcgtccgaggactcgagcacggggcggccccccacgatgccagcgttgttgacgaggatgtccacggcgccgaactccttgagcacctcctggcccgtggcgtagaccttggcgcggtcggtcacgtccacctcgtagaagcgcgcggagccgcccgccgcctcgatctcctgcaccagttgggggcccagatcgctgtggaggtcccacacgaccacgacggcgcccagcgcggcgaagcgcaaggccacgaggcgccccagccccatggcgccgcccgtgatgaccaccacgtcgcccttgacggacttctgcggccagatccagtcgaacatggcggcggcgaggagagatgaacaatgggccgctaatgggggatggagggagttgaagcggtgcggagggacggggtgtgtacgagagaatgtatagtaggacgggatgacatcttcgattcgattatggctggatgagcctgccgtcatgctcgacgcggcttcgacgtgagacttgctatcgggtatgacgtgagatgtatattgttggcattaggcctcaaccttgccgtgtccttccctttgcaagtctgtgaatgggtttcctcctccgcctttggccgaggtggccctgatgtgcttgtggtggatctgcaggctgtcgagcggccgtccgtccttgatgctgaactgcggctcgcactgagcagcaccgctcgcttcctcatcgctccgctcggggttcacgcgcgtctggcggaacttcttcatggcgttcagcgcgcccgtgatgcgcatcatgaagtcgtacagaccgatgggcgtcagcgccaccaccagcgccaggagccccacaatggtcggcatgagcacccgccactggttgcgtcttacggccttgaccacctgatcagcggcgtactccggactgagccacgtcgtgagcatgggcacccgcacgccctcgaacatgcccgtctttataaaggacggacacaccaccgtcaggttaatgccgtacttacccagcgaccgcagctcctgccgcaggtggcacatcagcccgtaggacgcgaacttggtcgagccgtagtccaccatgttcgggaacccgaagagcgagccggcgctgccgatgcacacgatgtggccgcggttccgcttgaccatgtccggcaggaacgcccgcagcgtccaaaaatgcgcgaaggtgttgactgcaaacgtgcgctcgatcgtcgcgtccgacgtcgccagcagtgtcttgccacatacgattccagcgttgttgacgaggatatccaccgtcccgaactgctcgagcacccgtcgaccggtctcgtagaccttggccttgtcgctcacgtccacgtggaagaagtgcgcttctccgccgccgtcggctgaagtgatctcctgaacgaccttctggccgttgggggcgttgatgtcccagaccagcaccacggcgccgagttgcgcgaagcggatagcgagcatgcggccgagccccaaggcgccgccagtgatcaccacgacgctccccgccaccgacttctgcggccacagccagctcaacaccatataagtatatgccagtgtctacagccgatgatgaagtgatagtggaaacgatattatcacgctagacgttcgtcctaagagggccatcctacccagaccacggctatcaataccaaccaagtcggccaaaaggctggtcatggtgttgagcacttcaacatgggccaggtcgggtcaaacacatccagacccgggtcgataggctatttttatccaatccagatactttgtcaactttcgtccaatagtacaacgtttagttacgtccaatccgatgtttttccacgttctttctgccaatgagctgctctccatagtaaagctctattgcccgcccactcagtcccaataaggcaggaaacccccgcggccatggcggactcggacgcgagctccggcggctccggcagcagctccagctccgactcggtgctcatccgcgtgccgctggaccagaagcggcgcaagaagctgcgcgcgcagctgcaggcggaccagcagcggcagcgcgagcgccaggaggcggcggcccccagctccgctcccgcgcccgcgcggccgaaactcgtcaagtccgagccagacagcgaccgcagcaaggtgcgcggcactccggcgcgtatttaccggcctccgcgagccttttaacgctaatattgacgttgttatgcccttaactcctccagggagagcatatctgcgtcgtgtgcgagcgcgagggcgacgcgctcgtggtctgcggcggcccctgcatctcggccttccacgcggcgtgtctgtcgcccgacagcggcgccgcgcaggcccaggacgacacctggctgtgccccagctgcagaagcaaaacccacgcctgcttccactgcaagcagacgggcgtggaggcgctgaaggacgacgcgcccgcctccgccggcgccgacccgacgctccgccccgtgcgcaagtgccgcgcgctgtcgtgcggcaagttctaccaccaggagtgcatcgcgcagttcccgctggcgcgtatcgccaccaacacgcacttcatctgcccgctgcacacgtgcgcgggctgcaaccagtcgggcgcgcagcaggaggccgtgcgctgcatgcgctgccccgtggcgtaccacgcgcgctgcctgccgcccaactgcgtgcgccagatctcgtccaagctgatcatttgccccaaacacgccgcggagcagaaggaggcggcgccagagagtgagacgaagaaggcggtgaaggcgcaggtgcccaggcagctgagcgagctgcaggcgcacgatgagaacgaggacgaggccatgtccgaggcttcggcggtcagcgcgtcgagcgccaggaggaaggagaagcgcgagaagagggagaagcgcgaaaagaagaagaagaaaaagaagaagaagaaggataaacacaagagggagagtctggcctcgcaggcggacgatgaagcggagcacaaggacggagagagtagcggcaagaagcggaagcgtagcaagcgagagtccctggacgcggatgaaagctcgaaggcgcagcgtgcagagaagattattccgtcgacgccgtctggagagcgcaaggagacgattagagtggaggcggttgcgactccccgctctccggctacaggaacaccaggcgctggatcgactcggtcgcccacgtctgcgttggcgctgtttgaaagtcctgccactgctacgaagaggatacaggagcgtcttgaagaggcgttggggaagagcgatgacgattccgacgagtcgacagctagcccttctctaaagaagaagcgccccagcagccagatcacaggttcacagatcgaggcagcagcaccacaggtagcaattatcaaggaggagcgccccatagcatctgcgtccaaggttgagcaaggccagctcgaggataaggcaaagtcgcccgtgccttcttctcctgtgcctgcgagcccagccggtgataaggactcgttagaagctcgatcatcggcggaggaggatagtccagaagtcaagaccgagcgtacgaaggagcgccgagacagccgtgccgcggatgagcagcgacaaccgcttgaaggtgctttgaagctggagatccccaagtcgccttccgccagcgtgttaattccgtcttcgtctggtggaatagtgctgaagcatgttccaagcgaagatgaagatgacgacgacgaaggaacggccgggtccgcgactcctaacgcagatgcaaccccaagaactccaagggtggctaagacaagtggaccgggcaagaaacgcaagaagaacaaggcaaagcgggaagcgcgtgcgcttaaacgagaaaccagcgaggaggaggaggaagaagccaacgaggccaagtgggtccagtgtgatagctgcaagaagtggcggacggtgcccccagacttcaatctggacgcgatgccaacacattggtactgcaatatgaacacttgggacgagcggtatgcgtcgtgtgctgttgccgaggaagtggtaaaggtgaatccgtccccgctagcagagaagaggaggtacaagttgaagtcaaggtccaagtcgactcaatccagcacaggggatgatggcggatactcttcgtctggatcaggtactctgaaaaggtctggaagctctttgaagggctccgttgccgacatgactgcgctggaagagaaggagaagggcttcagatctctcaagagcaaggacaaggcttccaaaaagcgcaaaattaccaagcaactcaaggagaagtaccgagaagtcaagtgggtgcaatgcgagagcactcaatgcggcaagtggcgtgtggtgccgacatttattaacttcgatcggttacctgcagtctggtactgtcatctcaacacttgggctccggagttagccaagtgtagcgcgccaaaccctcctgaagtggatgcgttcttgctgaagcaggccaagaaggatggttcggctcgcccttcgaagaaagcaaggacatcttcatctactggagatgctgcgccggcagcatctgtgtccgtgactactggcagtacgatgacgccaacgtcttcagcaaatgaccttacctctcttggtaaatcgaatacgacgaagcacggcaaaggctcaaaggcaacggcgtctgggacagggaatggtgcttcaaataccggggtcagtagcaatgcggaaggagggagcaacaacaacggcagtaacccagacggcgccacttctggtcactctaccaaaggaaggggaggacgtggacacaacaacagcggcgcgaacacgagtgggatcaagaagacggtgttggagtgggcgcagtgtgagaagtgcaacaagtggcgcaagctgccgcagcacattaaatcctccacgttgcccgataagtggtactgctcgatgaaccactgggacccatcgcacgcgaagtgcagtgttccagaggaagcggaccaagagcccgtgcctttgcctcctcacccaggttcgcagtggcacaagggaggacacaagggccagcgtccacgacgaggcaagttgagctactcggaattgctttacggcagcacggggcagctacgcaaggcatacacggcggagtcttccactcaatccttcgagtatgaaggcacgacctaccatcgcgacgaccagtacaagcacagcagcatgtatgtgtctccggcggcgatggcagcagcggctacgatggcaggatggagcggcagtgatcgggtgagcagagaaacaaactgcggcaaggcgacaactactgctggcagtcataaagtggatgcactagccgcagcaacccccgcccaggccagcgtcgaccacgtggctgcgttggtgcttgagagcatggacttgcggcgccgccgaagcgtttcggagctgttcgaagctgtgaacgctgtgcaacgagcagctgagtctggaacggagactggagcgtcaggccttgcgtcgctggcagtagttacagctgcgttgggccagttggagcaccgcggtatggtcgaaaaagtgagcgagctatcagaggacagcgatgaggatgagccttcccggaagcgaaggaaagcggagtcgctgttcagtggcgcgttctcgttaccgacacattaccgcaaggtgcccaccagacctctgaaggcctcgaaaagctggaaattcgggaccaacgtcgtagcagtatcaccgctgaaggattcgtaagtactcaatcaatctcgtagagattttcgtcgtgaagaagggctaatacgcaaaacagacatggaatgtaagtgcattattctcctctcttgcgtcttggttgtggattttacgttgcagcgtgcttgctgtggtgccaggacgtccgtcgttcaccacgctcctccagccgacattgtcttgagaagctctcgtcgcttgcggtgcagcctggcttcttggtctgcgatggctaacggatcgagatgttctctgcagtactcgtcgaagaaggctttgtcgtcttggaccagcggctctagcatgactacggaacttgagtctgcagagttagtgctctcggtgctttggctcaggagtactgcgttactggcggtgattgacactgagcttcgtccaaagggggactgcagaggggacaaactgccggcgtttgactgcctggttcgagtagaagacggcggagtctcgccggccatcctcagcagcatcgtttctagcggatcaacggaagtgccgagagcagtgacggtcgatggtggggctgcagctgaaacatcatcgagatcgcttgtgagcaggagctgcttgatgtttgtgatggtctactcaaaagagaaggggtcaaggcaagtcgtgagctgttagcaaacacgcggcgtcctggtactcgaacgtggacgtaccgcttcttcctgatactgctcaagcaaggttgttagcgacggaaagcagaccaagagaaggtcgcgccagctatacagcttgatgttcgtttccgtcgcttcagtcgatggcgtagggttggctgcagcaccgaggacgtcctgattccccgtgatagttaccaaaacaccgagactttcgttcgacttaagagaagtggacgatgccacatgagcagccggagacgtggccgagggcagtgtcgcccagaagctaccgattgcttcagccgtccgcacgtcgtacagcatgaccattccgttggaatactcgacgagcgccactgggagatccgcgactgctgtgatattcagcatcaagttggcgggctgtgcagaagtttggcgtgttttcgtggaggatttctttgctggcggtgagatcactcgcttcagcgctggcttgcctcgttcccggacgtcgaagaagtagatacgctgctgggacttggacagcgcgatgacgtattcggcttggtaaaacacgacgtggctcacctcggtggagactgcggccgacagcttttgccgcggcggtggccgttctgctgtgtcgtctgcgtcgctgaagggggcgaggaaggcgtagtcggagtcttgcagcacgtcccaaacgacaaccgtgccgtcttgacaccccacggtcaagtactgggtcgtcatgtcctgcgctgacgctgtgattttggtcaagtgttcccatgactttgtcggtgttagatggagaggtgaagacgcactgctgctgctgttgctgtcaagcgggagcaagaacttaagcactttgagtccgtagcatactacaaacgcgtacgctttgggagctcgaggaggttcatggtgcggtgtacgggttgggactggagcaacaaggaagtgcagtgcgggttcacatgcgtcttccatgaacggcgatcgcgttggctccagatcgacttgatacgtcggagttgagaggttcaaaggttggagaaccgcttctgcgtcttggttgctgctttcttcgcgctgaagactgtacaaggagacgatcttcgagccgacggacgtgacagcgaggagcgacacgcccggggagagcacgattgaaacgatcgaaggttccgctgagctttgcgtcggacgtagcgaagcaagaagcttgcaggaaaccccggcaccatcgtcactcggacttccagctcttaccgtgtagatgttcacacactcccggaatgttggagcggcaggcttggcgtcttcgacgggctcttgctgttggctggtcgttgtctcaacgagatgaacagcgataccacagctcggaagtcccgaattatcattcgcgagctgcagtgaactaagcgctttgatggacacgtgcactttagtggcggtatcagcggctccaacgggaacttcagcgtcgactcgagggaactcaacagggaagtcaccaagaaccttgacgtcattttccgctgtgctcagtacaggaagtgatggagcggtactggtcgatgcgtcgtcgtaatttatcccagcgaccatgagagacaacaggcagtgagatgccaggccggcaacttgctgggcgctggagtcgaggggaatctgccacgagggctcgcacgtccgtcgtttggcgacttcgtagtcatttctctgctgctgaggcttgtccgctccagtcgcagacctggacgagttcatcccgccctcggacgctgcagtctcggccctgaatcggacgctctcggtcgtgatgatctcccacgccgcgtcgaagatgtcgcgctcccagaccttcatgatgcggcgatacggctgcggaagttgcgggaagagcaggtcagggttcacgtggtcgacaggggcgctcagcgcgatccaccgaaggaacgtggtcgccgacacggctccgttaggctcttggaactgccacagcagcacacgggcttcggatcgaccgagggggacactgttcgctcgtagcacctcgaggaaggcgctgggtagcatgagaccccgtcgactcgagctgacgtcactgagtgcctcctacaacaagcaggagcagaggaaggtgaggtcggtcattgttcagagctgatgatagagacgcagatccacgtcaccttccacgttgcatcccattgcgcttggtcgtgcacacacaccgccctacagacagaacagtaaggacaggggaaccctctactcaatggtagattgactggcgtaccgaatttgttcccgaagagattgcagcacctgagcgtggtgagcatccatcgctcactagatccgccagcggtgtctgcacaagttggaccgaccccttactgccggaaggtcgcattgggaaccgtcatccctatcaggaaatgctcaagtttcggatgaacgcagtgaagtcatccagttttagctggtagaatgatgccaagtctccatttagcgcgccgtcaggttgattctctctctgctctgcccctctcaaccgagggggccatcaagagcgcagagcttcgccatgaccagcacgaccagcacgcgtccgcacgctttcggtcggtcgtcgaatgtgtggcagtacctggactttgtccacgaccagaataccccgccgtccgacgatcacgcgctgtcggccttctccgagtcctccgacgtcggtgacagcgatgacgaggagccggctccatccaacagtgacggcgccgcagctcgtcaagcgagacaacgaggctcccaagtgtccatcaagcggcacagcagggcacacaaaggctcgtcctctcgcatctcaagcgtgggaagtctaccggacctccaccacgtcggcaaactacgtgaaggtagcaggaggacgctcacagtatcgccctcagctctggcaggcgcagggctgcgagtggttggaggctccggcttcaactcggccgagatcatgcggagactcaacgctctggggacgtccgcgtccactccagcgttgtctgcgtcacctaccaacaatctccacacgatggagagcacaaccaaccagaaccaacagggaggagccactccgttgcagcttgcaacctcgggcgtggccggtcaaggggcaaacggagccgcagctgtcgtcgttccagtgtccgacgcgcagaagcttcgcaacgacttcaactcgcaggcgacgcgcctctcgttcggctgcagcgtggcgttggagctgttcaatggccacctgatgatggtgggcagtccggacggccaggtgcgagtccagtcgctggagaagctgcagatccaggccaaaggctacaaggaccgcgccatcttcacgctgctggacctcgcagacgtccgaagtgccagctccgtacgctacggcgattccgtctggctgcagctgagtgtggggcctggcgacgtctcgtgggagcagggcggagtgctgggagccaaagtccgcgaggccccgcaactcaaagcgctcgggctgctggatgacgacgctatccgcaacgatgtacaagcccctgcctcagtgggctacccagtccccgtcaccgcctacctccccaaggtttgtataaactactaccattaccattcaatgcttttcgtttgggttcttacgtgactattgctatggttgcagagtcgagatgacggagacctgcaggtagacgagatccaatctcgtctgaggaacaagagcgccaagatgttgggcaaatggaccattcgctctgctgtgtgccagcgccgcaagcaaaaagatgtacgttttcaaaatactacaacgaaaacattgttttttgtccatgaagcttactcggtatgatatgttgtagaacttcgtctacaacaacgacgaggtgtatctggagcaagattggttttacctcggcgctgactcggatgcagggatggcggtgctgcgccagctcccgccggcaatggctggcaaggacatcaagcctggtgactacgtcgtcgagcgtcggggagcctggaaactgcggctgctagactccagcagtggcggcgcggggctctcactggctcagcaacaaatggagcgcttgctactgcgtgcgaaggctcaattgaagcagtcgcaacgcatgcgcgcaggccaaacaaaggtctacggccccaatttgcgtggaggaacggggtttacggcccaacttcgagctcaagtggcagcttcgacgcgccagactgagagtcgctatgccgagcgtcaagagttgaggctcaaacgcatcgatcgccaaatgcgagagaaggcgcggagtatgaacgtgggcatcaagtttgaggacaatcttaacgctgacggaggcagcacccgacgctccaatagcgggatcagacgcgatagtgctttggttgacgagggacggaagaggacgttgctccgtagttcatcggtggagatcattgcgaccagtagaaggcagtcgctcgctggttcggacaagtctgggggttcaaaggaggcgacggacgttcggatgagctcgtcgcggtcgacttcctctctaccagagccgataagcagctgcggactgtgtcattcgtcttctatcggctacaatctgtgctgccagttccgagacgtcatgcgaatgctggagcaagagcggatactcgactcgactgcatccggtgaggaccctcagcaagatacttatggggagagtgcgtctttgccagggtcgaggagaaccgcccgaagtagagcgagtcgcagtgcgagacctgagaacgggttggctttaccccctcaagttgcgttgacgtcgagagattctaccgttcacaatggagttgagtctgccacgggtagaggcaccccactgagccacccattgaatgagcgtgtgttgcagctcttcgctaaggaggacgcggccatggttgacatcatcaagttcaaggagaaggaggcgtaccgcgccatgtacgccgagaaccaagcgcgcgtgggtctttcccccgtggcggcccacttccgagaccggttcaagcacgtgggcctcatcatgcagatgcacaagcagaaccagcaagtgccgcaggacggcatcagtggccacttccagaagctccacgcggatctctactcggccaacagcaagaaccgaccgactagcaggtcgatcgaagccgatgaagaggattacgactcggactacgactccatggacgactacgacgaccccgacagcgccctcaatacccccatgacaccacctgaacctcttcaagtcacgatcgaaccccactccggtagaaaacagagcgacgaaggtgtatcgaccccgcacgtggagcggatcttccctacgcccgaggagctggaacaattgacacccgtggacaccaaggcagcgctgaccctgtacgtgcagaaccgaactgcgatgggggagatgctggacggatacgcggagctggtggacacgcagatggtcccgacgctcaagaactcgctcagtacgcgcaaccgcggggcgatagtggaggcgctggacttcgtggctcgagcgtccgagttcgtctgcgcgcgtcgtgttcaggtgttcgtggccaagttgctgcacgccgtgtccgaaagcgacgtcggggacttcaccagtttccagaaggagtttgacgagctggtgattgaactgcagggcgcagtcaacttcatccgcttcttcctgcagactagagcggctcgacggaagaacaaggagactaaacgcatggaaatacgataaaagtatcgaattattcacgagtcttcgacaccgccctgcttatcgacgggaaagttggaataggtcaacgcgaccaagtgaagcgagtttgtcgactcgccactgagtccatcgacatccggccttgtcgcttgagatgacgcagtgtgcagcaggatcgaatgtatccgatgcgagagcgtcgagtctctcggctgaagcttttccgcgtcgtttatgagctacgagcacctccagcttggcatcggattcggccagttggtcgagtgtgtcgaggaagacttcgtgcgcggcccagttgtacagcacgtcggcagcgaacacgacgcggacgtttgcacctcgcaacggacttggcaatggcgtgccccactcaagtgctaggactgatgctgatggtggagatccattccggtcaagattcttctgcagtcggcccgtgcactcaggcttctccgtgaagacggccttaacgtgttggtgcgagcattgaaacctagccagtactgctgcaaataacccacacccggagccaagttcgagcattgtttggttgctgtccgctgggtcggcttgccccggagatgttggagctcgagtgctagcgtgaagcattgcccagctgagcagaattgaggcgtcccacacatgcgcccccatggcgtcaccatagtgttcctccactatcaacagccctccttcatctgtggggcgtcctgtagctgagactttggacggcgtggaacgaaaaagccgctgacaaaatgtgctggtgaggctggaagcgctcgagtcgcgagcgttcgtgacctgcagctgaacttgaagcggaagcaccagcacgcgttcgttgagccacgcactaccgacgcagaacgtctgcaacaacagtcggcggtggtcattcatggttggatcacccccgagcgctgctgtctgcttcatcatgatgctgagactgacacaagcgtcaatgaccgaggacgttgagccctgcaccgaagcccagaacagccacttggtttgtctatcagcagcggcaggagaaacctgctcctcgatctccaaagtgagatcatcagagtccatagagccgctctcctggttaccactgtcaccagaagtgagagcgatgtcgaccccttctggaggtgcgaagtgcttggggaacggttgccccacttcgtccacaatgtcgaccacaacacgaaacctctggccaagctgcacacgaacgggtaagccaaagcggagtcgaagccgcagcaactgtagatcggccggcagcgcgctttggagtctctgtagctcattcctatcgaagctgaagagcggcaaaggtgctgtgtccattgttggtatatcctctgacggggcgtcaattcaaattcagatccgtcgcctctgcgtctgttcaccaagttgcgatttaactgcggtcgtgttgagaaatggaggcgacgccaggcggtctgtcactgccgctgcatccgcgtcgagctcaacagctcttccaggtagagagggggtagtagctactacttgttgtcattagaccttaaggtttttgccggctctaattcgtccccattcactaggaaatactgcttacggacgctcagttgaccccgcacctgtcggagacgccgctacctcagcgactgcagcagctacaggtgcgaagtatagcacagagctttggtgatagtgtggctgacctgaaatttgcgtagagtctcaacttgagcggcattcaggaggccaaacgaggaacgagtttccaccgagttcggtttgctacagagctgaatcctcacagtgagatggaacaggtaacactgaggctctcgaaggacggatcaacgcttcacgtgctggcagacgctggcgatgcactcaccagctcgcttcagttggtcgacattcaaggaatcgccgtgcacacaacaccagcgaatagtttctcgctacagttcgatgaggagggcaacaacgctacttcatctactcctctggtggcaaccgatacattcgtagcatcaagcgcgagcaccttgactggatgggtgacagcgctaacctgcggggtgaatgccttccagcggcaactagaacagcaggacacgatgttttctgatgcgaaagcagtcgacttagtgtggcaggccgcgcgacttcgtatctttgagctggcacaagtgatgccgctgtccgaagcaatcgaccacgtcaaaaaatccgttccgatgcaggatctacagcagagcgaagccctccgctgccgtttgcaatttttgaactccgatctccctccgcgctagccagtatcacgtaaatcactttgataaaaaataaaaagagagaattttttattcatatgctattcagcaaaaaaaaaaacttggtaaaaagtctgcaacaacacatcctcggagtgtttactccagcgatcaagtccgtcaatgccagcaactcgaattttcttctgcacttcatctttagtccactcaggaaaaccttccactagagactgggaataacatgaatctgaccagcgctttactttcgacgacgcagaaaatctcgcgagttttgatctcaaggctgagtcggagtcttgcaatgagcacaaaaacttatggaaataccccatgtttaatgcgtgagtgttcgctcgcgtcacttgaacgaaccgaaccaacttgagctccttgtcgcttcaaccaaccagttttcggaagttctggcagattgtcgggatccacgacttggacttttccttgtggctataaaatgatcttttcacgttcacgcagctttgtccatccgtcgcagcacttgcgtcaacaccatccgataggttgtggaccgctcgttgtagtagttccaccacttctgcagtagagcgatcaaacatgtaccgagctttgccccccgcgaagtagaatttcgatcgcaccagcgtctggcgccaagaaagcgccaactccgcattatttggctcaaggtcatcggtcgaatacaactgagctcggacgctttcaaatagttcgtcgttcttgactgcttcgaggaattcgctcaacacccacgaggatacatacagctctcggacacccaaactgtgttcactctgctcatcgagtttacctcggatcgacatggctgtcacgactacaagtcgacggttcgatcgattttgctcgagccattcggtgcaggttagtttctccatgttatgatccaccgtcaccccattcagaaacacgacatgctgcttccggttgtcaacatcgctcaaaattcgaggcaccgcacacttagatctgttgttttcttcacgttcccctccaagcgcacacacgccggggcctcgtcgtgagtgagatgaatccacgtgaccacccacgtattcgtacgagcaaccgccaatgcgaaggctgcagcagttgctgatttcaccgtcccggacggccccaaaacgtatccctatcgaccatcgcgtagaacttcatattgcaaaaaacgaaacaacttggcaacgtcctcgcgacagtaaaggtccaggttcttacccaaagaatgaacgccaaaaccggagatagcagcggcgtgaagcttccaaaacctcgggagatggttgtcgtcgcggacacttggtaatgttgaagctgctggatccagcgttgtcgtggttgtccacctgacgttagttctcggcactttggtcggtctcgccggcacttcacgatgagcgcgttatcctcgtccagccccaacttttccactgaggcggatgatatcaatggccggccgttcttgccatcgtacgtggctctgttggcgtagatatggagctcgcagggtggaacatagggatcaatcttggtgtggagctcacagaggagctcgtcgacgtcttggacatcttcagcagggtggacataaaccacgttccaacgctcgaacgcgtcccgggtgccttcatcactaactggaaccagactttgcgtgccatcgctgtatcctgaaatgtgcgaatgactgcaagaaacatcaatcatgcgccaaaaagcagtagatagatagataatcggacttttctcatgtcaagtgaattgtaaactacgcgatctcaagtcccccccttgaagttatcgtcacgtcctgcaacgcaagaggctgaacgtcgtgcaacacagaagtgctctgaaaatgggtccacggttcgtgaatgcacttaagaagccaagttggcgcaggatacacttgacgctgtccttatatcctttcgagtcgtcgcaccaaccgcgcaagttttcgagagcgcctgcgatcgctgtgaagatgacggccaccgcgaggctcacgtgctccttcttgtcttcggcatcgcttcgcacgagaaaataactcgccgctaggatcgcggcagtccacagtgacatcccgacccaattgacgatcaacagcgctagtctgcgtagaagctggcgtatcaacttgccaacgcagtcttggaacggccccgggttttcgctggccagcatgcggaagtagctcggcgcaacactccacaccacgtcatcgacgccgtcttgcttcacttgctgtagctggatgcgatcggcgaactcgagcaagccgtccacctttctccaccccatttccagcaggatgacctcctccctttgacaaaacacatcaccgcaggttggcaagaagtcaagggtcgctggtgttgaggatcatttcgaataccatagtgcagctcttgcaatatattattcataaagtaagcttcatcgatcattcgttgcgtagtattacttgttgagcacttggcacttctcgcgaaggctgttggtcaggccccctgcctgcgctttggcgtcgtggagcacttcattgatattgtcgggcgcttccgagttgatatcgagcgtgaatcttgcgatgggaggggcgtctccttcgccgtgcagcgcgacaaacaggctccaaaccatcggcgtcacgagccggaagtccttcatgatctcaagtcccgaccgaacaaaagccgcccgattggggtcttcactggccgtgtcccagccaggctgcagcagctcgtggttcgtgatcggacccggcaaggggccgcccttccccacgaacagcgcccagcggttcatccagtcggcgtgcactgcaaaccagcactctttgaacttgagctccttccggtcgtaggtcatcaccagcttcagctccagacgtcgacgcagctcgatgtcttccgagtacgtgggctcggaagccgaggccaggctcatccgctgcaagctgacagccgagattctgcgacttggtgaccgcgacaccggtgcgggtgctggcgttgcagtagttggcggtggctgcactgtcagcttcactgggggtggtagacggaagctcaatcgtcgaggctcgctactcagacggcccaggcgctctcgaatgcctgccagcgactcgtgtgagacgtcttctccgttgatttccacgatctcagcacccgaaggcacgctgccgttcctctccagcgcaccacgagaaccgtcaggcagagggatgaagcccaacaccacggcacgattcgccaccgagccatcaaggtgtagaccaagcgaacctgctggaacctccacgctcacgactttgtcggatgcgcttggaacgaacggatgcgtgtcggactccagcgcacgatcctccatgcctgtcacgcgcacgaacgacggagatctacccgttgacttggccaccgcaggcacggtcggcattgcagcagttgattcagctgtaggcgacgtcgtctgaccttccggggttgctgtgcgaggcgtagctaaggctgtcgcagcgcgtaggccactccacatccagcttgaccactccccagcagactttttgttgtcactgccttccacgagacttgttgagctactggtgggaccgagaagcagttgagccttgtcatcctgttcaggactctggggagtgcttagtgccatcttttggtagttctgcggcggcacgcggaagcgcagttgtcgtttgaggtgcgcagcttctcgcaggatggtgccaatctcagcgagcgtcttcctcggctcttgcatgaagtccgtcttgtccatcccgaccagtacgctgccgtgaggaactttgccactcgcttccacagcgccgggagtgccttcacgcgccaccggagcgaagtcgtccagcaacgcggcatcggcgcagcttccatcgagcaagataccgagcgggcctgcagggacgttcacctccacgatctgccacgccgtgatatccatgccagcaacgatgatgctcgagggtttgactaacccgccggagatctgagtgaactcgccagttggactgccgggtgtcgcgatcagctgcaccgtgtccgacgtggtcggcttgatcgccgagaagagcgccatcatggtgttgtctgctgccacttgctggatcaatggagctttccacaatgaagtctcaggtgtgaagctcactaaacgcgccagtcctcgagtatgacccgcaccttcgtcctcagagcgacctattttcagcctggtgagcacctcaatgcatcaagaaacgaaacttaccagcgcctgcttcaagacacccatccatgcaaggtcattttcatctccatcatctctgattcttaccgcagcaaagcgagcggtggggactgcgtcttcacgtcttgaagtagtatgtattccacctgctccacacgtcagaacagcacacagctctagtgcatcgcatcgcatcgcacgcattagccagttgactgccttcgtgcttcacaggggtctgaaaagatcctatctactgcgaagctgtgggcgccgggggcggcacttcagccgacgagttggagctgacagcaggagctgcactcgcactcgcgtccttctcgccatcgtcgctgtccttgctgctgcgcgggctgctgccgagcgtcagcgccttcgtgagcgagatggtggccttgaccgtgctgacagccgcgcggaacttcctgcgcgcgttgaacttgcgcagctcctgcagcgccgtggacagctgcacgtccttggccgcgtcgccggcgatccacgggtgctccagcagctggcgcgcggtccagcgctccgcgggcttgagcacgagcatcttgctgatgagatccttggcctcggccgacacgtcgtcccagtagggcgagtcgaactcgtagcgtccggccttgatgagcctgaagagcacgccctggttgtcgtggtggaagggcgggtagccacacagcaggatgtacgtgatgacgccgatgctccagatgtccacctccttgccgtagggcctggccatcaagatctcgggcgccacgtacccgggcgtgccgcaggcggtggacagtccggcgtctccgttctggatggccgacttcttggcgaagccgaagtcggcgagcttgatgtctgcgtcgtcctcctggctgctcagcagcaggttctccggcttgaggtcgcggtgcacgacgtcggcgtcgtggcagaaggcgatggtctccagcagcaccttgacgaggtccctggcctccctctccgagtagaagttcttcttgacgatgcgctcgaagagctccccgccgggcatgtactcggtgacgaggaagaagtatttttcttcttggaacacgtcgtagagcttgacgatgtgcgggtgctgcatctcgcgcaggatcttgacctcggccacgagcgcgcgcaggtcgtcggccgacagctgcgcgcgcttgatgcacttgatggcgaagcgcgcgcccgtggccttgtgcgtggcctcgcgcacgaccgagaaggtgcccgctcccagctccttgcccagcgcgtactcgtccgcgaagcggcgcgccgcgtcgtgcgccgccagctcctcgaactgcacggcgggcggcggcggcggcacgaggaagcgcacgacgcgctcggcgccgctggtgctcacgaggatctcgcggatcctctcgaagctccaggcggcggccgcgtccgtgaagtcgtgctcgttcacgcccagcagcagcgagttgggcccgatctcgccctgcagctccagcgcgccgggctcgcccgagccccccacggggcggaagccgtccacgatcacgtggccctcgcccacggggctcttgctcacgatgaggcccagcggacccgcgggcaccaccacgtccacgcgcttccagtccgagcggtcggggcgcgacggcattgtcggtctgtcagttagtataggggtggagcacggggtggtgcagttgtggacagctaggaagagctaataatggcatgccttgcttgacacgggaacaggagcgtcacatggcgtacttaagtgggactatagtggacgcgctatgctacagtaggtggtcggaatgaatatccatcaggcggacaatattcagtgggggggggacgattacgctggtgtcgttgttgtgctgtagcgtacttagtagtagttggggatgacgacgtcacgcgatggggagccggagacgggcgcgaatatccaccgcaagcgcccgcgcgaggcgccgccgcagtggagccccgacgcgagccaggagctgctgcggctgcgcttccgccagctgcgcgcgctgttcgacgacgccgagacggtggcggacgtgcacgaggcctggggggtcgtgtcggccaggctcaatgataccgacgggctgctggacgcgcaggtggacgccgtcaagtgcagcgaccagctcacgaggctgcgccagcagtggcaggacagcagcacggcgcagctgcacctcatgatggccgagtgcttcagcaagagcaagggcgtcgcacagcagcagcagcagacacctccacagcagcagcagcaacaacaggaaccggttagacgcagctttaacagggcgatggagcaggccatggcgcaggaagaagagagcgcgagggtggagacatctccgaagcggacgaagacggcggagacgacggctgtgccaacgccgccgcagaccgagacgacggtggtggttgtgccaacttcgccaccactagtagagccagtggaaccacctccatctccatctccaccgtctcttcgggaagaagtacaggactcacccgagccagcgtcgttgtcgcctgagccggttccacaggaagaggggggacacgaagtgccagctgaagacgaagagttcccgaggcagaacgagatcatgcacgctctggagagacgctctgagcagctcgagagactcgccaagtcccaccaaacgctggctgaagcgacccagaagctcatggaagcgctagtgaaccggcacctgtagccggcctttgaagcaaccgtattagcgaattggcgaatgaagcagtattggacttgaacgggcgaatgggtctgctagaatgcgacttgcttttgggcaagtgcacatattcagatattgtgggggttcatggctatccgttccgaggaatcgtatcgacgaaagctacgccagaggatcgaggaagaagggagctgccgggggagactaatgttaaccaatgcacttggatttatgtgaagctcgcgtcggcgtgttgcaattactatgctgggatgccccctccatgggaagctgagctggctcgccagcgagggttctgcgacgctggagcaaaagaatgtccatggcatccttcagccatcgctaagcttatatgaaatggtggctgcggcagttcacggtgccagcgccacctctatgagttctgcgcgcctcgccatttcccatttcacggcctccaagacaacttccgccgccttcaacccgtcagtgtaccgttgtctcggatgcagcaccagatacccgacgagattcgctatttgctgccgccctctgtggtgtgggctcacgaaatgatgggggtcctcgagatcatggaagagcaaggtgtgtaccgccaggtcatcgacgacgcgaccaaccgcgcgatcggcctcttgggggtgctcaacaccgtggcctacccaccgcccgcagagcggcccaacgtgtggcagcgctatctgttcgagctggacaggcagcaattcaaggacgagttctgtatccatccacaaggagactttcaaccaggcggtgattatcattgatctcgaccccgtcttctctgacagcgaagcctagttggatgatcctgtctgctgccaacttctcgtgacgctgaagcgactaggctcttctggtgacgaggtggatggtgaaccgctgggcagcatgttcggtattacaggggatacggctcatcgctactacatgcgctgcatccacaccctacacaacctgcgcgatgatctaatactgtggccggacgaaaagggggggggggggatcgcgcagcggatcgaggacgagcatggattcagtaccctcgccgaagaagtctcgccattcgaaccttagattgttttgtcccaacactcggctgtcatgaaccgagcccggccaacccgcattgaagtagctaccaatgcaacagcatcaacaacagataaatcaactcattataatggcaatgcaaaggtatttcagcagaagacgcaccagatcatccgcttgtcgtccgagacaacaatggtgttaaacgcgtgaaagccgtcctggcagaggtaatcttcttcgcggtgcgacggtggaaatgccaatggaatcaacatgccgtccacacacccgacgcaacccagtacttgctcggcgactccgcctacagcacccacgaaacgctggtgcctagctttgagtctgaccccgaagaacctctgaccgacgcccagttgcgctttaactctctcggctttcgtcgtggtggagcagtgcgttgagatgctgaagtcgtagttccagagcttgaacggcctccgggtccagatcacggacgacgtagaatccgtgaggcgcgcgctgaagcacatcgacgcaggcgtcgatgtgcacaacctgtacctggcgggccattagctggattgacaacactgcaacagcttcctgaatgttgccatgttcctctcacccatgtcaacttatatcttaaataggggtttcgtacttactcgaagtatctgttggctgggcgtcaattcgtgcgtgccgctgcagtcgacaccaagcgcccgcccgatccgcagcagcaaagagctccgtccgccgccatgttcaagcgcttcagtgtggacgagcacgtgagcaccagcagcaaggtcaagtcctcgcagcagcgcagcatccgctccaaggtgctggagcagtacccggacctggagccctacgccgagatgctcatgcccaagaaggcgcccatggtggtggccaagtgccacaaccacatccagatcgtgctgcacgagggcgagcccgtcttcttcaaccagcgcgacggccccttcatgcccacgctcaagctgctgcacaagggtgagcaccgttccagctactgatgctgaagctattgggttttggcgtagcgtacttacttgatggttgtgtgcagtgccgcacgtgatgaagcaggtgcgcgcggacaagggcgcgatcccgttcgtgctgtcgggcgccaacgtcatgtgcccgggtctgacttcggccggcggcgacatgcccgagcctctcgaggctggcacccccgtggtacgttggtgtagtgaaacttgagggctgtacgtttcgttcggtgctgatgctttttctcttttggggtgacaggctattatggcggagggcaaggagcacgccatggccatcggcatcctcaccatgtctacggacgacattcggaacaagaacaagggcatcgccatcgagatggtgcacttcctgggcgacgacctgtggacgtgcccgcacatcgattaggcagcgagcagattgattggccgagtagaagagcacttgatggtccagttactctgacgtgaactcaacccttgttcattcatccgaagttacttggcgcaatttttgactcaaagtaatgggtacgacacgttttggtgtgcatcttgacgtctttcagtatctatcgggcccgaggtgctaggatttgtccgagccattttgcgtcgacgccagcgtccgctccagccgttcccgtaagctatggctgagtcccctggtcgcacttgggctggaaagtacattaccgccgttggttgacgccgacctgtgtaacttccagtcgaaattgtgcgtgttgacgttcgtggctgcaggctgtaggtcgatgccccctcccatgagcgagttcccgatcgtaaaagctggagggccactaggtggtgggcctaagtcgacggccccgctgttgtcctcagtagaagtggacgcagtattggtgtctttggttgtttctccatcctcgctcgcaacgctcgtcagtgaaaccagcctgtccagactgaggtttgtctttggtggagatgacggcgccgtggtcaaatctttcgcggtctcattcgcctggctgattaaacgcgtcaacaagcccagtttgtcgagggtcgggtgtgacttcggtagattgagcatcgaaatgccgccacccgtgagcgaattctggagcaggaacgagggtggcgcatcgggcggtgggccaagcatggctaccgcattcttgcccctattgtcgtcggagctcttgtcgtctttgctggcgtcacgatcaccaagaggcttgaaggaagacagtccttgaattccacctcccataagcgagttctggagagtaaatgctggaggcagttcaggcggagggcctagacttgtcgcagtcgcagtcgccgacgctgcacttccgttgctatgtgtacttccactcgaccctgacggttccagccggtaaaatcgagcgttgctgttaggactgccaatttcgcggggctcttgctgcttcttacttccgtccgatgatgttgacgctcgccgtgcatgattgatagcagtctgtaatgcagcaagtgggtcaaaccggtaggtttccaaacctccagaggccccattgtgagtcgtgtccgaagtcggtgctgaagccgtcgtggtgaccgaggaggtatgcgcactagtatccgtagtagatccatcgaccggagaagagttagctggtgcacgcgctgcactcgacaacgcgtccaaagcagtgcgataggacgcagaagaagacgtcagctggtgtagggccgaggacaagcctggttggtcccccagcagccccgccgctgacgccgtccccgtagattgagtgccgcccagcgtaaaaatcggctgaagtccagctgacggcgaggggaagtacggccgcaataagtcgccgagcgtccccaatccgtcgctgtcgttacgagcaaacagcggattggatctcggtggtggccccacctccccagcactcgagctggccgactgaatcttgatatccgataactgcgatacaaaactcgacgtcgtggacgaggtcgaggcacccgtcacactggcagaaacgtccgtcgacgaggtcgagtggatgcccggcacgcccgtggacgacgtggagtgaatgaccgactcgtccgtggagctgctgtggctttggctgctgcctccccgcttgatgggttgacggaactgcggctcgtagaagataggtacatgtttcctgttggggcggggctttggaggcgagtccggggctggcggcggctgtcgggcagcccgtcggcccttggtcttgttagtcgccgcgtccagcggcgcgttggctgcatggcgctggtcccgccgcaggatcttgaccttgagtgtgcccgtctcagccttggcggtgaaggcgttctccttgtgtttgcgcttgacgccgcctgccgacacaaatatcagagtaagagttgtttagtctggggtatttcttagcttgttcacacgtagaacacgtgcaactggtatgcaactgaagcgcagacacagaggaagctagcggggctccgtgcaggctccggtgtgcaccacagagcgcaagacgtcaagcggcgtaccggagctagcgacgctctccatggtgtgcggaatgtttgttctcaaatgctttcctcatttggtactgcgtaccatatacaggcgatatggtacagtgtaccatatgcgctgtacctactaagtatttgaagttgtggctacactaccttgacgccaacgatggaggtggacggcgcgaggcttcagctgctgctggcgacgacgttcagtgcgcgcgcgctggaggacgacccacagtggcgcgacgtgcccgaggtggtgcgcagctcgttgctgctggtggcgacggagctgcggcgtctgcagcgcctgttggttgcaaatctgcagcctcgctccgctgcgcttcaaggcgccggagaggaggaacaggatcctaggatccagagcctgcaggtcgaggtgcggcagctgaagacgcaggtccgggacttgcagcgacaggccgacgcccgccacgagaagagcaagcagacgctctcgagtctgtggggcgaagtggccgctaccgcccgggcgacggccgacgcgcagacgcagcagctcgcggctgcagaccgcgtcgcggccagttgggaggctgcagagacgcagcttaagctactgcagcgccgcgtggacgagcaagggcaggggcgatgcgagctgcgcaagcggcaggagagctgtagccagcagctccgacggctcaaaagggacttcgaagcgcacgaccatcgcgtggtggggacggcggtgccagttcagatgacagcgcgagtggtgacggaggggctggacggggagatccagcagaggctgaggagcggaactaggaagcatggcggggcgggccgcgtgctgctgcatcaacgctacgtggaagcgctgaagagacagcagcaacgggacagagcggggctcagcacggtcgtggaggatcgtgtcagtgtgtgaggaagaagagcgagtgagtgagtggcagtttgtgagatgatgttgatattgtggtgtggtgacacagtacgaaggcggtttgaaagctggctgcttgataccgaaggatggcccaattcttcaagaagagtacaatgtggacaagtacttaatagtaggttataagtcaaaactgacttcgtcttcacgacagagtttgagctgccaccgtagctccatgtaatggctcggtaaacgttgcgaacgggctgaagtactccacctgtcgacgagtgaataaaagttggcccggatttcctaccgcaagctctaccaacaaccgagggaaccaccccacgatcgtcacagtgcgctgaaccgccaataccgaggtgtgcatgtcgaagctcgctttgttgttgactcggatgctccatagtaaacgcggcgagaaaatttcgtcgtctccaatgatgagctcaaacgcacagccaacagcgacgcatagcaccagaatgaccgctggcagtccaaagtacctgcggatatgcagttggtgcgtcagactcggtatgacagcgtcgaggaccagcaaaaaatgcaaccaaagccaccaagcgacggccgcaagacgcggcgagacctgccaactcgacaagtcaaacagacaggctgcgaggacagtgccctgggaggtggagaagagcacatcgaagttccagacgagtaagcggagcagagcacgctgggctagtgcaacaacactgcacgtgaagatcagcgaacatgaagctgcggtagctgccacgccgactatataggggttcgtggaatctccccgctgggcaaaaaaatcataaaccaggagatcgctgtagcgctgatccccacacttccagtcatctacagcgcaatgttttcgcgaggtgagatcaaccgctttaataaatgagcaaggagcagaattttcgttgcgtccacgactagagctttagtcggcgccagttgcagttgttgagctcgtaataaattgctggttgtgtttggcactgatacggaggcgggtgctgaatcgcgtagcccaagtttcacccgtgccagtatcaaaacgcaggggatagtatgtcggccaggcgttggagctggattgttcctccggtcatggagacggatttccatgcgctgacgcttagtgtgggccttcttgaacatgaagacggcgatcgtcgaggccgtgaagacaacgacttggcgagattggaagggcataacgccgatgtgaagcgtcggatagctcgagtccaccacgagactgtaagcgcagcacacgacgagggctatcattgctgggccagcgatcattgtggactttacggcggcagggaatgtccggaagttcgcatcgatagtcaccaccgtctggaaattgaaccataatgtgaaacctgtaagagcacgcaagtcaccgaagatcacgcctagcccaaaccacgtgaggaagttgagaactgagatgaagcagaactcgtaatatcgaggcaacaggcagaggatgtcgatcgagaagaacgacgcgaaaaatactggaggaagcgttgaaaccacaaagaagagagggatccatggacggacaattgtcgagggcacatacagcaagccagcaaacgataccaaactgatgccaaacagtgtcaaaagtatcggggtgaagcgatgcatggtcctctcaaaccactgatacgctccacctggcagaagagctgacgcgggtgttctggatatgctgacgactggcaatgtctgcgctgactgtagttcatacaaccccgttgcatctgactgtgttgctctttgtagttgacgctcgagtctgttggcaatagcaacagtacctgctacgacgtcaagatgagtggattttgggccccctggataattgacagaggggactggggcgatacgtaggcttcggcgaagcgctctcgagctggatcgaacattaggaagagaatgcagtcggcgcagtggcaggacacattgacgagtgcaagtagatttccaaaatactaaattgccaaaatagtttgaacgagctggcagcaacatatcgggctataactactcgctgtccgtattccacacacgccctccaatagcgtccgcggtaattttctaggacaaagcaaatgctagtgagtcaagcttgcaacgtctacactatcaacacgaccactatttgcctccactaccgggacagaatcttttgcttgtcgtcgccgccaacacctcgaaacacttcgcttctgtgcatcttccaccacccccgttggtgctggatctgaaaaggtcgcgtatggactaaagtattcgacatgccgatgaagaaacagcaattgctccggactcccggtagctagctccactaggagccgaggaaaccagcccacaatcgtaattgtgcgttgaactgctaacgttgatgtgtgtagatcgaaaccggtgcctcctaccacgtgtacgctccaaagcagccgcgacgagaagacactttcgtcgcctaggatgagttctagagcacagccagcggcgacggccagcactacaataactgctggtagtccgaaatgtttgcgaatatgcagcttccgtgtcagacttggggtaagtgcgtcgagcacgagcagacagtgaaaccagagccaccaagcaacaaccgcaaggcaggacgaggtctgccagcgcagcagatccagcagacatactgcgagagccgtaccttggaacgtcgaaaagagcacgtcaaagttccacagaaccaagcggactagatttcgttgagcgagcgacacgaacacgaacgtgaatgcgagagagaatacagcagcgatagaggagacgataagtttgagctgatcagttggccggtgttcctggtggtacagaatcaccacccaggcaatcgctgtagcgctgagtcctatcacgccggcaatgtacacagctatcagagtgaatggagctttcatccaccacagaagacgcccaggtagcaccacgttcctcgagtccacaatgaacgggtcatggggagcgagtttcaggttttgggtgtttgacgtgtcacttgtagtttgttgatccgtcagcctcacggctgatacgctaaagcttgctgatcctacgcggggttttgctttcaaatgtttcagctttagtcgtgcgtgtagaccgacgcaagggatggtgtgtcgtccttgcgctgcctctgggtcagcttctcgatcttgaagacgcttcttcagtcgatttttcttcgcgaaggccttcttgaccacgaacaccgacagagttgacgccgtgaagacaataacttggcgcgactgcagcaccaaagtccctatcctgatagaaggaaagctggcgtcgaccacgagattgtacgagcagcacacgaccaaaactataaggaacgggccgctgatcataatggacttgacggcggtcgggaatgtccggaagtttgagtcaatgagcacgacgctctgcgaactgagccacagtccgacgcatgaaatggctcgaatgtctccgaaaatgacgcctagcgccacccagttgagcgtgttgagcgtcgaaacgaaccagaactcgtagtggtaggccagcaacacgagcacatcgagcgagaagaaggtcacgaagatcacgggaggtaacacgatagccgcaaccatgacaggcaccaccggcataatgaactttgtcggcacgaaaagcaaacaaccgaagcagagcagactgaaccggaagagcgctaccagaaaggagttgaggaaacggtgcatcacttggttcagtcggttgtgaagctctgccggcaacatcttggacaccagcgtcttgttgaggtcaaagcttggtagaggttgcgccaattggagctcgtacaaatgctccgactgcgggtccagcatgctggcaacgcgcgaactggtctgagcggtagaaaatgggacttccggggcaactccgagcactgcaagcggttcacctggcggcttggcctcgttgcgcaccggaacaatgcgcatcttgcgaggtcggactgacggacggaagtgttgtcatgttcatgctagaagctcatgctaaagaggttgacgctataaaaaaagtgtagttactaccggtagtctgatcctctttgaagcacgactaatctaagttcagctgacgatctgtgctggagaatcaaagcacgcctcctttgccaggctgacggtgaatgatgtagagcatagcgaaactccgcaggtgaaaaatcgtaacaccggataccggtaccgtacccacgctgtctgggagaactcaattagtacatgtaactcaccattatcgtgtgcaagtggaagaaaacgcgaagtctaagtagagctctacgctggtcagtgctccataggggcaaggctctaaaagcaagtacccgtagtatggtaccgcgtaccgtttttacggcactaatcgtgtgcacacaaccgccttatccattgcgaagacggcgaagatgatgaacatgcggtcagcgctctcgcggcctctgcggcgcgctctgcgggcgcagcagccgcgctggatctccgatgtcaagatcacgcgcgacacagggctgcccgacctgatcatcacgccagtggcggcgaaggtgcggctcacgcaacatttggtctcagttgacgttgacgcggactaatttatttaccagaaactcatcgaggcggccgagcgccagaagacggagaatctgatgctccgcgtggctgtggagggtggcggctgctccggcttcaagtacgtgatcgagttcgagaaggacgcgacgcccgacgaggaggaggacatcgtcttcgagcagcacggcggcaaggtcgtggtggacaaggagtcgctcgagctcatccgcggcagcaccgtcgactacgagcaggagctcatccgcagcgccttcgccatcgtcaacaaccccaacgcagtcagcggctgcggctgcggcacgtccttcgacctcaaggactgaggcagaagaccacgcggctctgaatgcataataaatacagctaacctctttccaccgcagactcctcttggctgagctgacctcgctttgtgtgctgcttactcccagagcaccaccacgccgttcttgtcacaggacgcgacgccctggccgtcgggacgccacacgcagcaggcgacggcgccgtggtggccggtgggaccgggtttgagctgcttctcgagtttgcccgtgcgcgtgttccagacgaacagcacacccgaagctccaccggcgagtgcgtatcgaccgtctggactgagagaagcctgactccagtcgaacccgcactggtagtccttgtgacggagctcgcgcaacacgccgtaggtgcgcgggtcgatgattcggagagaatggtcgcgcgagttggtgagcagctcgttgccgccgaaactcacggacgtcgcttgctcggtgtggagaccacgcatctcctgcacgcagcgacgtgtcctggtgtcccaaaaacgaactgcgccgtcctggtgagcgctcgcgaactggacgaacccagcatcggcacctgtcggtgccgcaatgtcattgcagctcgagacgcagcccaccgtctgcagccgcaccccgcgcataacgtcccacacccgcagactgcggtccgacgaacctgtgatcacttcgtgaggcaccacaggagaaaactctgccgccagaactttgcccttgtgtcctgtgagcgtctgcatgacacgcccagtgcccactctccagacaaaacacttgcgatcacagcccgtgccgagaaccaacgctccgtcctccgacgctcgcacacacagcaacggatgagccgtgcccacccctcggtactctcctagagctctgggcggcgacgccgagcccgcctccgcttcccacgctctcaccgttccatcactactgccactaaacagaatcttcccagacgtattaaagcacaccgagttcacctcggtggcatgggctcggatggagtgtgtgacgtgcgtcaccaacttggcttcggggcccgcaccacccagtccttcctcctcgctcagcagcaagtggctcatgctctccgccacctcttgcgccatcctggcactagccgacagcgccggtgacgggtgctccgttctcccatctccgtcgccactcgtcgcctgaatccactcgtgcagcagcgcgctcttctcctgcacttgggtctcgagctcggcgttgcgcttgcgcagtctctcggcctcggcctcgctctgctcgagcagcgcgcgctgcctggccagctcctcgcgcgccagcagcagcgcggcgtccagctccttgagcgccttgtccttctcgtggcccagcaccgtctcctcgtccaggcgcttggtcaccagcagcagctgccgctcccaggcctcgcgctcctgcagcagcgtcttgctctcgctcacgagcgccagctgctgccccgcgtagctcgcgagctgcgcgttcttatccgccagctcgcgctccagccgctggatggccgccaggtacttctgcgccgccgcgtcgtcctgctcctgcgcgctgggcgccggcagccgcagagacgcccccagcgacgacgagctcgcgcccagcgccgagcggaacagcagctgctggtgcgacgcgatcaggtcgctgaacgccgccacctcgcgccggttgcgcgcctccagcagccgcagcgcctcgcccgcgaaccacgacgacgagtctgtagccatgcttcttcgcaatggtatcgtatcagcaaatgacttatttctggtccgggctaattcacgcatactgtacacctgatatgtatttgggtatcagctatttttggttggacatttattatagtccccacttcaactcgtggtctaattatacgtcataaattggactgcggcaagctgtaggggacactagcgagcgaggttggacggccatgagttcgtggtctagtggcttatgggcaagcagctactggaagcgggcgtcgatccttgggcccagagccgaagcaaacggggcaagacaaccagcgctgcccaccgcggccgtgatagctgcagctcgtacagccatcgagtgttgatggctgtacgagctgcagctatcacggccgctgcctgccatcgacatctccaggacgccaatgtccgaaatgatgtcactgtcgaggcatacaaaggtggtgccgataatgcacaaagtgaccccagtactggtgcgacttaaccgcgcgaacattttggtctttgggtcgatccttttcctgcctgcgcgcacaactcgaccgtggctgccactgcttgggattatctcattggtgccgcctctgagcttcacgctgttcctctcggtcgaggtccttggattgctactaagccggagctacgagtactggtttgtgtccgttctcaacgtcatcaactggatcgggatcgctcacgtcttcggcgacttccgagcgctcgtgtgtgtgagcttctggctgaactcgcagaacgtcatctccatcgacggcaactataggacgtaccagacgacggtcaagtccattgtcatggcggggccttccatgttggcgctggtgttttgctgttcgtatcgaatcattgtcgacgcggccccttcgccgtcctttatgatcggctcagtagagctgcagtggcgccaaatcgtcatcttcacggcgtccacactcattatcttcatgttcaagaaggcgtacgctaaggtccaccgtcgtcgccgacgtcgtcagatccacagcgaggctcacgtacactcggaaggcggtaaacacgtcatctcttgtgtggttttgcgagcgcgcgtgtgcctggtacccaccgcgacgaagcagaggctccgacttgcgaacattgtcaggaaccaacccgctactgcgtcgaacaagcagcaactgcgtctggcacgtcatagatccgtggttattgacgctagacgggtgttccttccggaaagatatctcgagcgtcttggcgctgcaagtattaaaactgcgctgtatgcgactgcagtcacgagtctcacttcgacagctgctgcttgggtgttgctgctgcacaacgcaaagcgccacgtgttagtgtccagcgccgttgcattcgtgacctcactgctttttgtgtcgactaccgcagctctcgctcagagggatttggtccggctgctcgtttggaacttcgatgtcctgttctcagcctttcaagccactgcattagctctgtgtcttctggacttgttttgttggcgtgctgcggcgagctgtgctgtgatggcgtggtggttgtggttcgtttggctcttgctgctcgatgcgcttacgcccagtgttacgtccaagctgcaccttcgaaaactcgctcttcccgtgatcatcttggtgctatgtatcgctttgtcgtgtgcaatggagatcgtctcgagccatgactcgatattcacgtcgcgcctatttttcagcatcagtttgccgaatctggggacgtacgaggagcatacgggcgctctggcggtgcagcgcgttatgacgatcattgggtggaatgctcgacttctgtttgagttggcggtgggtgacccaaaccagctcctctttatctgcaggaggatcgagtacgtcagtccgttccacacattctccgagccactaccgacagagcagcaaccaaagcgtgcacacttgtggcaaaggaaactattgtactgcagcccattgttgtgatcccccaaatctcgcgacgccctgacaccaaagcagcgaatggacctgctgcgtttttgaccggataggatacttagcaccagcttttttgtcgtggaaatcttgtacttcgaagtagtctgcaaactgctgtgctagtgtacgtgtactgtacgtacatgtagtgtagtgttcgtttttggtcttctcacgcaaataacagcttgcaacgattccgatgtgcagagtgtactttccaacgtgataaagtagcagtatccaagcggtggcagtcgagacgaggcctacgattgcgatcaagtgcagcaaaacctgagtccgaggcgatacgaaaagttcgagctgcttttccgacaaacgtccaggataatggagccgtggtgggctaatcgaagttgctgagcgcatgacgctgtggcggcttggttccggacaacagtaccgagtctcagtcgctgcttcgagatgaccggaaccaggtgcatccgggcgtgcagaacgacgcatgatatgacatgccggtcaccactagactccagatccacctggttgcgagcttgaactcgttgccgatatactcgcaaatacgcctttttgaccaagaagatgacgagcgttgacgacgtgaaaatgacggtctgccgcgactccatagtcaagatgccgatgggcagcttaggagagctggaatccgggattaacctgtacgcgcagcatgccacgaccattatcaataacggccccaacagtatcgtagatctgaccgtcgacgggtccgtgcgataattcgcatcgacggatacgacgatctgtgagctcagccagaggacaacgcacacagcagctcgagaatcctcaaagatgcgacctaagccaatccagttgatggcactgaggatcgagatgagccagcactcgtaatttcgttgtaaaagggcgaaaacttcaagcgataagttaggagcaatacgaagcacagggacgggatcatggagactgcgccgaccagcggcacccaagggcgaatagagtccgcgggtgagaagagtacacagcaaaatgccacacagatccgattgagtcacaccagcgcaggttttacatggtgcatccatcgtattgcttgcccgtacgtcgcgggcggaagcattgcggaaagtggggttctggaaatgtccacgataggcaaagcgtgtaccagttgcagttcgtagaaccagcccgcatcactcttttcaccaaccgcgccgcctctccttccgttctgcaccacgcgcgtgcttggtcccacaacttcagctgtggtggcattcgcgacttgggtcaagctgattctccataagctcggttgtctgcgcccaagtaaatccatgagtatagtggaaaaagtggagtgctacttgtaccacgaccaccaagcgaagctgagctgagtccacgagaggcgtattattggtcctctcaatgcgggaaagcggaaatgaagggagcctcgtcgttgtattcacgacgttttttgtgtgatgctcacgttgtccccacgagcgcatttcacccagctgtcatttcgcacagcccaaactcgacaacttcatcaaagaagcgggagacttgcgcgtccccccacagagagctccatctcctttgccagtggataaagcgtcaaaactcatggtgtaaatacatgaatccaactcccccgttgactttcacgacatcacacgttagtaggacaagccgcgcattccacccaatgattgtgatgattcgctgtactgcgagagagctggtgtgctcttcgaaagtcccgattttaggcaagggtatagccaacagcaccgtgacgtgaaagttttaccatcacccgcaacgatctcaaccgcgcacactgcagcaactgacaaaactacaagaatgactgggagagcgaacttgcgcagcctcagctgctgcgtgacgctgggggtgagcgcgtcaagtatcagaatccagatgaaccagagccaccacgccatgagagcaagactcggcgatatattccaccttagcaggtcaagcagacacaacgaacttgctctgtgcgatccagcccagctcctcttcatcaagaggtcgatcgagtacaccagcccatttccgaccttcgcagagccactggactacgagcaactaccgcatgcaagaaccggtgctgcttgcagatgctggagacggaaatggccccgacctattgatatgaccagcgcggtggcttggaaggctgaaaagccacgtcaaagttccagaaaagcaagtgcagcaggtctctttgagcgagagcagtggatgacagcacacagatcaccgagcacgcgtcttgtccaccttgacaaaagaaccctccgttccgtcgctataaaaggcttggtgactgccattccattgtcattcttagcatcgcgttgctgtcaccaggctcctccgtcgtgtcaataatcccctcgagtcgctatgacggtgatccgagtgtctccgttcccgcgacgacacactacgccggacgagaagttcacgaaatcaaggcggcactccgacggtcgcgacaatgcgtccttcctgtacaaattcgaggcgactcgctctctgcccgtcgtggatctgcggcaaacgctgtcgctttggcttcaaggcccgcagctgaacctcaagttcctctggtggatgaagaaacatttcgggattctgcacctcggccaggtgctgggcacgctgcttacactcgtggtggtggctgcacctcgcaacgttgggctagtattggggccaatttctgtggtgatgtcgttgacgtccatcgtaagcacaatcggcaccgccagcatcgacgtgctgcggctgctgacccaacactacgagttctggttcttctcggtggcgaatctcgtcacatggtcgctgctcgccttcttcttggcggatccgcttcgtatcgtcagcctcgttccgctccggctcatcctgcagctcacggtgtccatggacgccaactttcgcaccttcgtagtggctgtacgcagcaacattttggtgctggtcgtgctcatgatcatcgcggcgctggtgtttttgatggtcatcgatgtggactcaacgcgcctcgaattggtgatcccaatctactccgctctcaacgtctcgctgccggtcattgggctcttcgagaacgcactagccacgctcatcccattcgtcatgcgggtgctctacacgaagcgcaagttgttcggtgcacgcagcgctgggtcgaaactggtgcgttgtcaactgtaccgagcccaacttgtgctgcgtcctgtgcggtactcacgtactgccagtctgggcgtcgagaccaatcgtaggagctacgtcttgcataagcaactgggcatcacggcaccggagatgtcgatcaccagcggcaacgacacggcgcggcatcaccagcaaattacgctcgtggcactgcgactcagcgctatcgatacgcgcaacacgctgctgctgtcgtggccagtgcagacttcaggccggctgagtactatcaagctcttgggaatctacgcgactgggtcagcaggtttagcgcttcccgtggtgacactaggacttccaccaagcggagctcaatcatcagcccaatacgtcatcccagtagtgggtttcacgctcacgatggccttctgcagcgtgttcgcctgcgcgagccaacgcgatatgctacgcgcgctgctgttccacaacttcgggttcatcttctcgatgatgcactgctcggttgcttgtctgtgcgtggccgacatgatgagctgggacaatcgatgctgggcggtgggtagcgcctttgtctggttcgtgtgggtccagctactggacgccgtcactcctccggtgaggcgacagctcttgttctccaaggtgcaggtggttctggtgctgtggttgctgtgggccttgatgttcgcggtggcgtacgccagcgtcttcatcccgatggagcgtagcggactgcacgaacgagacctggttcatttccacgtggggcaaaacgtcacggtgctcaacaccaagagcattctgctcaatcgcctcatcatcatgttcttctggatgcagcgtcacgcgtggaacgtcttcacgggggctttcacacgctgctggaggttcctgcggccgccaaaaccttcagaaatcccagaggaagaggccacagatccagatgaagaggagttgagcaccatgcgaggctcgctcgagtatttctgcccgttcgagaccttccccggcgtcagacgcatattcagcagtctgcggaggtcgtccactagtgggcgcagcactcgtagggtctctataacagggcggcatcgagttcgacgtctcagctccgcgatcttgctgtctggtgtggtgggtccgagcgtgaaacagcagcagaaacctagacgaggtgcgttcggacagcgctcgtgcgattcacagggtgagaacgatcaccaaacgaaccctaagacaagatcatggacgaacagcgctcctggcatggttcgcgacgagtgagtcgaggatttcggtactgaagacggcaaacgtatccttatcattccatccagcttcagtccgtgccaccaatgccgtcattttggtcttggtgagttgagggcagatctgatgctgccttgtggatgcgagcgatgaagagcccgcttgtgttctgcgacggcgtgaagcggatggtgcctggaagtcttccctcctgtcaatttaagaagcgtacagtcttaggttagaccgatgcaatggataaactgcagccgaaatgctatcgtacctggcacggcacatcttcactacgcacgatcgggtcaagcttagccagcggttcgtcctggaggaagcttgagacgatgtcttcgttctgctttacagacagactgcaggtgctgtagatcatggtgccaccaggccgcaacatactaaagccgttccggattagtccatgctgcagcttcaagatccgctcaatctcgctcgagttcaagtggtcgcgcacatattcctcccacttggcggcagtattcagtcgctgcaggtggcggatcgacccgtcatgagtgcactcggcatccacgagcaccttgtcgtacagggcggagtccagaaccagcagcttctgccgcttggcgtccctcgcccgagcacttttgttcttacgcttgcgcatccggtctttgggcgctcgcgacgcaatctcctgcgtgtccagcagcacttccatcccgtcgatgtgtgcgcactccgtcttgggtccgatgttgaaggtccttccgtccgcatggaacagtctgcatctccacttggtgtctgcggcctcactctcgggctggaagagctggtacttgtgcaccaattgcctacaagcgcccagtctcgatcgcgaaaagtcgacgcccgtgacgctcccgcgaagctgcaggaggtcggcgatcatggtcaacttggctcccggggcacagcacaggtccaggacgtgctctcccggctgaatgtccagcagcgacaccgcataacccgacgaaatgtcgataccgtacagctggccttccttgtagagacccactcgagccaatggagccgacaccggcagcgaatagaaacctggaagccatggaacagcttgtggtacagcctgctcgacgtgctctgtgtcgttttcagccgcttctcgggccaaattggcagcaatagcctgcagtcgagggtcttcatcttctgttgcaccggtcccagcaagttgtttgagtctggaggcgtgtgacgcagagaaaacaaggaaaacgtgaatctgaggacatggaatgatacacaactttaggcgccaatatcgccttaccggaagaagcgaagcgagtcgccattgcacgacggagtcaacaggtccttcgtagagaccttgtgctcctccaggaagcacaggaaacccgcgtcttcccacacgcgctggtcatcccaagccgtcgtggcgtccgtcgtcgtcgccatgccttccaccgctggtgaagccatgtaccactcacacatggtacacgatcgcgtgcgccgattggcggaaagacgatcttgggatccgcccgctaatacgcgagatgagcgctggtggtcatcagctccggttaaacgcgctctcacaactcaagacgagagcccaagcgcagtagccaagagtaacgtagtgtagccatttccgccatgtccgaggcaccgaaggaagccaagaagctctggggcggccgcttccgcggcaacgtggacccggtcatgaacaagttcaacgagtcgctgtccgtggacaagcgcatgtggcgcgtggacctggacggcagccaggcctacgcgcgcgcgctcgagaagagcggcgtgctgacgacggccgaggctgacgccatcgtggccggcctggacaaggtcggcgaggagtgggcggccggcacgttcgagcccaaggacggtgacgaggacatccacacggccaacgagcgccgcctcacggagctcatcggcgccgtgggcggcaagctgcacacgggccgcagccgcaacgaccaggtggccacggacgtgcgcctgtacctcaagcgcaccatcgtgggcatccaggagggcctcaaggagctcatcggcacggccaaccagctggccgagaacaacatcgagctgctcatgcccggcttcacgcacctgcagccggcgcagccgctgcgcttctcgcactgggtgctgagccacggcgcggcactgctgcgtgacgccgaccgcctggccgacctcaccaagcgcgtggactacatgccgctgggcaacggcgcgctggccggcaactcgttcggcctggaccgcgaggcgctggccaagtcgctgggcttcgctaacgtgacgcccaacagcctggacggcgtgtgcgaccgcgacttcatcgccgagttcctcttctgggcctcgatgctcatggtgcacctctcgcagctctcggaggaccttatcatctacaacacgctcaagttcgtgaccatggccgacgcctacagcacgggcagctcgctcatgccccagaagaagaacccggacgcgctcgagctgcttcgcggcaagagcggcaccgtcatcggccgcctcaacggcttcctcgtgacgctcaagggtctgccgcgctcgtacaacaaggatctgcaggaggacaagacggcgctcttcgacgtcgtcgacaccatccaggactgcctgcagatcgccaccggtgtgctggccaccatgaccccgcacggcgacaagatgcgcagcttcctcgtcacggagatgctggccaccgacctggccgagtacctggtgcgcaagggcgtccccttccgtgagacccaccacgtcgccggcgccgccgtgcgtctggccgaggacaagaacaagccgctgagctcgctcacgttcgaggagctgtccacgctgcaccccaagttcgagcaggatgtcctggacgtctggaactttgacgtcagcgtcgagcgcaagaacgtcacgggcggcaccagcaagagcgccgtggagaagcagatcgccaacatcaaggcgtggctcgcttaagcggtacccagctgagcagcgttggccgctgccaacgtcgcctccatactcgcagataacaaacacatcggccctcgagccgcgtctttataatccccttcctaatgaagaagcaggaaccctgcaactcgtagcacatctgcactgcgttccctgttccggtttccctgctttacagcttgctgtagcgccagtaacgtaaaacactcgacttgctgcttgcttctccctgttcagcagcactccaagccagcaactcgggcgaaacactcgatttccacgatcatctctcctcgccactagcggcgctcactattcaacaagtcgggctctgtatctcctcttctctctagtctctgggtagtagtaggcagacgcagctctccttgctccagcttagtggcccctgcacagcacagcacagccacacaaaaccaacacggtcagcaacagttaattgacacagccagcagcagaagcaggagacgcacgatttcttgcggcgcaggatgaagtcgatcatggatccgacgcggcggttggcgcggcggatgttctgctcctcggctttgcgcttgcgcttctgccacttcttctcgtggaagcgcttgagcgccagcgtcttgagcgtgccgtcgcccgccaggatcgtctgcatgcggctggccacgcggtccgcatcctggccctcgggcaccttcgcccacagcgagcgctgctgctgctgagtggtgcgggacaccagcgtggccgtcgggcggcgcgcggcggagcggagcagagccgacatcatcttggtctcagctcggggtgctgctaatggagtctgtggtccaacgcgaagtcttccaggaaggcaatatgtttatcgggaagtcaaaatagacatatatctaagttcgaaacgcacttagaacgactctagctaaggttcgctgccgacgtggctgcactattgaaacaaccgagccaaagcgcagaaatggccgacgaagtggcggacgtacccgaggcgagcctgcgcaacctggtggcgcagaagtcgctgcagtggatcttcgtgggcggcaagggcggcgtgggcaagaccaccacgtcctgctgcctggccatccagctggcggcgcagcgcgagaaggtcctcatcgtgtccacggaccccgcgcacaacctcaggtctgcgctgtactgcaagtagtacatgcgctctacctttctcttcctctggcgctcactctacttgctttattctacccctctctcctgcgtagtgacgcgttcggccagaagttcacgcgcgagccgacgcccgtcaacggcttcaccaacctcgcggtcatggagattgaccccaatgtcgacgtaggacgccgctctaccgcctctacctactgccccacttcgatttactgactctaccaacgttttgttgctgcccttgctagctggaggagatgaatgccgatggcgtgcaggacaactcgggcatggcctcgttcatgaaggacctgaccaactcaatccccggcatcgacgaggccatgagcttcgcggagctcatgaagcaggtgcagaacatggactactcggtcatcgtgttcgacacggcccccacgggccacacgctgcgcctgctgagcttccccacggcgctggacaaggccttcgacaagatcctgtcgctcaagaaccagttttcgggcatgttctcgcaggtgtcggcgctgctgggcggcgcgctgccctcgcaggagatgctgctgggcaagctggagcagacgcgcgaggtcatccagaaggtgaacgcgcagtttaaggacccggagcgcaccacgttcgtgtgcgtgtgcatccccgagttcctgtcgctttacgagacggagcgccttgtgcaggagctcaccaagtacgagatcgacgtgcacaatgtggtcgtgaaccaggtgctgtacccggaggagggatcaacgtgcaagagctgcggtgcccgccaaaagatgcagcagaagtacatcgaccagatctacgacctgtacgaggacttccacgtcgtggaaatgccgctgctgaccgaggaggtgcgcggcgtgccgtcgcttaaggccttctccgagaacctgctggcaccgtatgagcccaaccagtaacgagatctacgcgaacgattccgtgctgagagaagagagaagatagcattttgttcaacacgtctagatcctcctattcgtcgctgctgtcactatattcagctactaggctggctacaggtgctgctggtgccttcgccttggccttcttcttcttcttggcaactactgtggtcttcttctttatcgtcaccgccagtgtaagcggcgctgctgctgttgagtcagctttactttcaccaatcgaggacgtcagcccggtcgcagctgtagtcgccttggtatcttcacttgcatcacctactggcctcttcagcgtgttctgcttctgctgcagcttttgcctctccgcaaacacgcgatgcgcctcgcgccggtcctcctcgagctgctcctcctgctcctccttgctgagcttgccctcgtcagcgtgctgctgcagcagcttgtccgtgtccaccttggcgtggcgctggttgatggccttgatctcgtccagcgcgtccaggatgtccatctcgcgcttggagtcgagcgtgcggttctcgagcgccttcatggcgtcgcccttctcctcctcggcgcgctgggcgatggcggcctcctgctcgtcctccgtctcgcgccagggctcgaagttgcgctggcagccgtgctcggccacgtagtcgccgcgcttggggtccgtcttgaaggtgatctcggacgagcacgtgatgcacttgatgtagaagcggtagatgcggatgccgtggtagttctcctccagcacctcctccttgcgcgagttgaacttcttgccgcggtacatgtactcgccgcaggtggcgcactggatggagaagggcagcatcatgcgcacctccacctgctcattcttgggcttcttgcgccgcgggatcagcgacggatcgaagtccggcgggaagtacttgttcagcaccttgcgctcgcccatgatgctttgatagggtcgatgtgaaaagtatgcgggtgctgttatgaggaggaatgtttgagcgtattagtgggcctggagaagggaataccggattacataccggtttagccgattggaaaactgaacctgctctagcgcattattgctcgattatccggtggtgcaattttgaagcaggaccaattccagaccaattttggtccagtttcgaagcggacttcacatgttgcaagcagtctaggatggcagatcgagtggtggcgagtgcgggtgcttgggcgcggaggatctatgtgcttgcgtgcagacccaagcagagcgtttcagtgcggggcgtgggcgactggcgtggcccccgccagtgagaggcgaaggtaaccgaggcacgcggtcggtgccagcgaaatgagccttggtccggtgcgaactacacgaagttggtgctgatccgcttggaaatcatcggcattactcggatcatttgcccgcgttggattgaatgagcggctcaccgaacggggtcacgggcctgagcacgggcagctctcgattcaacctggtgcttgaccttcaagcagtctgctcgcctcgatacatgtaagtcgatacagaaatcgagcaatcgagtcgattgctcagcgcgccgtagtctgccccctcagccattgcttggcgggtttaacctccgcctgcgcgacacctcgacgttgaagacaccgctctgcacggtcgaagcgcaatccgagcgattatcttatggtagaacccaggcggacccaaatccgatcacgtgcggattttgggctcgtcgagacgttgagtctcgcttggcaaaggcggccgcacctccggaaccagccgcagtctgctggctgcccagctgtgcggcgccatcggaacagctcggcgcgcttgcaaacagcgcatgcaagtgtgccagcggcacgcaattagacatagcgagcaggcgccgtcccgccggtgctgcttcagaggctgctaaaaacgtcgccgccagacaaaccgaccccaagcaacacgctcgttgcatcgcaacaacgctcgatgcagagctcgcttgcccgagcgcggcaccacggtctccgagcttttacgggccgcatcctatcgacagttcggccaacgcatctggccacctcttccccatcgccgccgcgcttgccggtggcggacatcgtacgcaacgtggggcggcgggtcgccatgttgagtgacgcaaaatatgatcagtccggggtgtgcgtttctcgcggccgaaggttttcctcgcccgagggagcccagttcctccgctcggtatcccgttggtgcaggcagttagacttgaacgctgtatgtagctggataaggctggcccggccttgcgcgctgttcgggagggaagacacgccgaaaccgttcagccgacacaaacggtgcttcgcacggtaaagcctgaccacacgctgccgagatcgactatcctggttctgcgttctaaacttgctttaaagtctagacacaaaacactttcaccatacctgagtatagcgataaaatcgacagtttatactatcgattaatgcaggtctccgcatttacatattttagaccaatggccgcgctcccctgctggtggtctgccccgcctcctgcgcgattgttcattttggaactggtgaccaccagcacaagcccctcgcgccgtccgcccccccttcacgatggccctcacccgcgcctccgtcgccgccgggcgcatgcaggccgcctcgcgctgccccttcatgcacgcgctgcccacgtcccgcgccgcgctgctgcccaacatctcgcagctggccaagatgtgcccgcacatgtcctcggtcatgggcgccgcggccgccggcggcagcagctcgcaggcgcacgccacgtccaccacgtcgcacgccacgctcaagcgcatcgccgagctcaagaagaaggcgcagcagcagaaggccgcgcagctcggcggccccaagccctactcgtccgccgtggcgcgcttccctacggcggccacgcgtcagaaccgcgtcggcggcctctcggccacgcagtacgagaagggcttcgcgcagaccatcgagaccatcaagcgcgagggccgctaccgcctgttcgctgacctggagcgcaagcgcggcaagttcccgcgcgccacgcaccacgaggactcgggcaagaccaaggaggtcgtcgcctggtgcagcaacgactacctcagcatgggccagcaccccaaggtcatcgccgccatgcaggagtaccttatgaagtcgggcgccggctcgggcggcacccgcaacatctcgggcaccaaccacaaccacgtgctgctcgagcgcgacctggccgaccttcaccagcaggaggcggcgctgctcttcacatcctgctacgtggccaacgacagcgtcatcagcaccctcaccaagatcttccccgacctcatcatgttctcggacagcctgaaccacgcgtccatgatccagggtatacgccacagcggcgccaagaagtacatctacaagcacaacgacacaaaggacctcgaggagaagctcaagatggccgaccccaacgcgcccaagctcatcctcttcgagagcgtcaactccatggagggcacggtggccccgctgcacgagatctgcgacctggccgacaagtacggcgccatgacctttaacgacgaggtgcacgccgtgggactgtacggcaaccgcggtgccggcgtcgctgagcgtgaccactgcctggaccgtatcaccatggtgacgggcaccctggccaagggctacggcatcatgggcggctacgtggccggcaacgccgcgctcgtggacgccatgcgctcgtgcgcctcgggcttcatcttcagctcgtccatgcctcccatgctcgccgccggcgcccgcgcctcggtaaaccacctgaaggagagccaggtggagcgtgccaccatgcacgcccgctcgcaggagctcaagaacaagctggtggacgccggcttccctctgctgccgagtgtgagccacatcatcccgctgatggtgggcgacgccgtcaaggtcaaggaggcctcgcgcatcctcatggagaagcaccgcatctacgtgcagcccattaacttcccgaccgtgccccgtggcgaggagcgtctgcgtctgacgccgctgccgacccactcggacgctatggtggaggacctgatgacggctctggaggacgtctggaccacgctcgacctgccgcgccacttcgtgcccaagggcgagtacctgcccaaggtggagtgggccaactcgccgctggagatcgccggcgagttcgtggtcgagtcggctcaggaggctgcctgcgccgcctaagtggcccccaatgcggcgttgcctcgcactccgttaatggaagagcccgaggcccatgccgccgccgcctatccaaaatcaaccacacaacattatgcgtaacgagtaggatgaggaaccaaaaggaagaagagcgtaagtctcggttaatgtatccccacgatcctgcttctccagaaggtgacaagcaggaccaggaagttccatcctatcaaccattacagtcccactggtgtgtcctccaagtcgtctgtatcgtgagcttccagtattagccctcaccaaatcagctgccaggctattcgtatttggacttcttgttgagaagttctcttctcaagcgccaagacacttcagtgctgactcatggttaccccttccgtcgcaccgcagccacagcgtccagtgcgcggtgccagccccacaaggcgattgaagaagcccaaaaccgtgctgggcagactcaagcacgtgtggaagtcgacccaagtgagccaccgaggacagtactccatcgagagacttcttgcgttgggggaatacacgcagcgcacttcaagacttcgagtgctgctcgtgtgtctgggttctccgttccccatgaccgccttcgttttgctggtagaatgcgtaccgctgcaagacccgagcgttgggtggagagagaactacggtctttggattcgcagcgctgtcatctgcggcgtgatcgcggccacgatgctcgtggagctgaagtatttgatcgagggcgtcaaagtctccatacgacaggcaggtttcgtgctggtttgcgtgatggtggtggattctacgctgctgatgaccgcagcggcctacttggtgttcccaatcccgttcatgagtctgttgatggtgcctccgttgctcgcgattgtggcggtggcgctccgagtttcgttcggaggtgacgggttcaagaagatgcaggagcacccagcgcagttgtacggcttcgtgctcttcatcttcgctcaggcgctgacgctggtcgtctaccccatctaccaggtgctgtttagcgcctccgtgaacacgcactttgagctcagcgttatgatgctgctcccgattgtcaagatgatggtcaagaacattgtcgcgtcgagcatctactacatggaggacatgctacccgagtcggtcattttcactgtcgacttcttcaatgctgtctatgtggccacttgcatgcgccaggcttcgtcggtctttacggtagcggctatcatgttcgttgacgtgtttcatactgtctacgctcttcggagactgcgccatactgggatagagatcaaacggcgactgaatcatgacttgggcagcaatattactaccctggatctgttggaggttggctgctcgttgtgccagcaccgcgacaagttcgagaggcaggagctctcgcagatccaattgcgttcgtgtctccctcatacgctctcctcgactggcaaaagcaccatcgcccggttggagaagtacccactcaaacctcctattaaagcgcaccgacgacgcgcctttagtacgagtgttgtaccgatagacaacagcactagcgctccacatctgtgccaacctgttcaaagtgcaggatggaaggctgcaagacaaattgctaccaaggcctacgcagtttcggtcatgaacagtatcaccaccaagacatcgcaaaaaagcacggccacgcggactcaaagcgtcatttcgtcgtattcagtacccccatcacggattctccagcgaacgctggaaattatgttcatgacggagtgtctcgttctcaccgagtacttggagtccttcacaccagccttctacgtcaacttcctgctcatcatggttcgactcccgagcgcgcagtaccacacagaactcgacggcatcacacaagacaacgtgatggatacgctgctgccggtcttctactacggactactcgagcttctgtcatttttgctcctcgtgtttgccattcgacgtactattggcatggatgcactgtatcacctagcgttcgtgttggagacgcagacgtcgttgatccagagcaaactgatcgtgtggatgctgctgacgctgacgtgtcgagtggttcactatggtgagttagtgagagctctccttgactagcttcagctgattatgttgttgctatttcccaggtttcgacttcaccttccagttttcgtggaccaacgcaagtatctaagtgatacctacagattaaaaaaaacttacagattagcatgtagatattgttcatagcttcttctcgatttgtcatgtgtctgtggctctacaaatagtgtccggcatcaggagaaactatttattttgtttctcacttcgcctataattgtagcacttgaactcgtcattgactgtcattttggtttgatgccatgatggctccaccccagccacgacgtccagggcatgctcaagtgcatagacgagcaatgcagatgcccattaagattctgctaatcaaactcagacgggcgtggatgcgggtgcaaataagctatcgaggcaggtactccatcgaaaggttcctgtcactcgaagagtacattcgacggacatcacgcgctcgagtgttcgtggtgtgcctcggtaccccattgcccatggtcgcctttgttctgttggtggagtgcgtgccactccaagacccaaacgctggctggagcgaaaacatcggcatctgggtacgaagtgccgtcatttgcagtgtcatcgccttcacgatgctcgtagagctcaagaacttgatcgaagaggtggcgatctcagtgttgcagacgattttcgtcctggtctgtgtggtggtggtggatatcgcgttgtgcatggctgtagctgcttacttggcgtttcccattccattcatgagcattgtcatggtgcccccgttgctcgctattgtagccatttctctccggatagcgttcggtacccaaactttcaagaagatggtctcccaccacgcccagatatttggcttcgttctgtttatcatggctcaagcggcgacgctcgtaatttacccagtgtaccaggtgctcttcaacgcagtgacggatacgaaattcgagttaccggtcttgtttctactgccaatcatcaagattctcatgaaaaatgttgtggctgagagcatcgactacatggaggacatgatgcccgagtcgatcatcttcaccgtggacttcttcaatgccgtgtacatggctacatgtatgcagcgaacgtcgtcgaccattacagtggcgaccgtgatggccgtggacattattcgctcggttataacgctgcagagtctgtatgggacgtcgtacgaactgcagcggcaggtcaaccgagagatgcggtgcagcggtgaacggttgaatctgcttgaagtgggctgctcaatctgccaaaatgtcgacagattcgctagacaggaactctcgaaaattcaactgcgctcatgcctgcctcataaactttcccaagctggaaaaattcagctttctcggctggagaagttccctttcaagccagccgtcaaggctcacctccgccgcctcagtagcttggcagttttatccattcgcagcgtagatatggccacggcctatctgaaccaacgatctcaaagtttaagacggatgtcctccagacgccagagtgctaaggtttgtgcgggggcaccgataagcagcatcccagtaagatcatcccagcaacacagcgcatccagaagagcaagcgcgaattcccctcatccgacgtcgcgcattctccagagaactctcgagatcttgttccgctcggagtgcctcgtactgaccgagtacttagggtcgtttgttcccatttgctacgcgaactttgtgtgcgtgatggtccagctgccaagcgtccaataccatacagagctagacggtattactcctgccaccgttcgagatacggtgcagtccgtcttcacgtacggagggctcgagatcgtgtccttcctggcacttttggtagtgatccaacgcacgattagcctgcgcgcgttatatcacttggcgttcgtgctggagacgcagatggccttggttcaaagtaaactgacggtgtggatgctgctgacgctgaccttccgggtggtgcactacggtgcgtttgcagataggtaactaactagctggtaaattgacatttctcactcacaagttcgtgtttttgctttggcccggtggtgctagcaggttacgactttacgtttcagttcccgtggattagcaacgaggccagcagcatttcttgaattcattaggactcgcaggagtattgtgggggattttctattctgccaagatcttagccaattttgaataaacagagtgcacccttaaaaattaggagaattcttggaactggtattcttcattccaactgaacgtgaaggacatcgatgtgatgatgaggtatattggacaacttctcctaacgaggattgagtcctaacaaccctactgccgtggtttaaccctcggccgcttcctctccactattcccttgtaggcgttgatctattagcgcctctgttgcatctgtgtgcgtgttagaccactcaagcatacatcgcgacacaagtgtgtcgatatgtgggaatcttgcctgaattgcctctggttcgaggtcgtgcgtcagctcttcctccggtactgtcaaggccaggctgcgcgctgcagtgttccccgacttgctcaagagtgtccatgacgcgactcgcactctgtccgcggtacgtctgcacttgagaaaccacatttgtagtcgtcttgcttttggtggcgctcgagttttaagtactcgcaggatcagctcgttgtccccagcgacatggatgcctctgagtccacgtgtgtctgcagcgctgcgcagatgataaagggcgacaaaagcagcaatattgtgagtgcatgatggcgatgggagtgagaaacttgttccccacaggctcccacttagtacgccatgacgggcaagtactgctccggcacgcgcccctgcatgtggaattcctttgtatccatgaaagaagcccaccacatcattttgtagtgccaccgcgtgcacggggcactgcgacgaacgtgaaggacatccacggacacaaggagctgtaacgaaaacaattttttgcaggttcgtgttttctacggatggtacatctcacattcgtgatgtagaagaaaatatatctaacccagcgcaagtttgcactattttacctcttcatgacacttttgcttacactttttcttacatagcaaaacaaatattcaaaccataaatttattcatgtgcgtcaggccaagtgggagctataacgggcatcatagctctgtctacgccatcttatcagcactttacatttacatgtttgtcgtgttggagccgggatggaatcctcaagacaagaaagctcgggggtaatgaagttcaagtggcaagatcttccaggactctgtgcaccaagcttaggcgggcttgggtgttccttcaagtggagaatcgtggcaggttctcagttgaaaggctactggccctccacgagtataccaggaaggtctcgcgcgttcgggtgtttcttgtatgcgttgggactccattgccgatggtaggatttgtactcgcgctcgagtgcgccccccttcaagacccgaatgctggatgggaagacaactacggtctgtggatacgctgcgtcgtcatctgtggtgtcatcgcctacacgatgctcgtggagctgaggaacgtagttgaggctgtggcgatatctattagacaggtaattcttgtactgatctgcgccatgatcggaaatacgacgctgtgtatggttgttgctggaagtctggcgttcccgattccgtttgtgagcgccctgatggtgcctacactgctgggaatcgttgctgggtccctcagactggcattgggccagcaaggcttcaaaccgttgcttggacacagtgagcagctttggggcttcgtgctcttcatattcgctcaagcgttgacactggtcgtgtatccggcctaccaagtgctctttcacgccgttgtgagtacgagatacgagcttccagtcatgatgctgctcccgctgattaagttagtcacgaaaaacatcgtcgcgtccagtatccgccacatggaggacatgctgccggaagccgtcaccttcaccgtcgacttcttcaacgctgtgtatttggccacgcgcatgcagcaaatgacctccctcacgaccgtgtcgattgttatagcctttggcttggtgaacacagcgctggcgttgtacgaattgtaccagggggttgtggccatccgcggccgcctgagtcgcgaggctggcgtggtcgtgcatgacgttgcactgctcgatctaggacgcttcatatgcggggaacacgacaagtttgctaggcagagacactctcagatccaactgcgctcgtgtctccctcatacaatatcgcagtcggggaagcagattgttcacagcctggagaagttctcactgaagtcaagcaccaaaactctctctcgtgcggttagcgaggagtcgatgctagctcgaattagtgccgcatatcctacgaacgccccccccaccatccgctggaacgcgaccaatggactcagctctaagatatacgctcaaccatcacaacacccatcacaggacaaagtttcctttgggaagcgccacgccggctgcgaccagcacccgtcgcgcgtcctgcagataaccctcgaggtcttgttcaagtcggagttcctcgtgctcaacgagtacttggagttcatcaccccgcttttctacgcgggcttcgtgcgcgtcatggtgcacctgcccagcgctcagtaccacaaagagctccaggggatcacgcaggagaacgctctacagagactgcagtcagtcctgctcaacagcctactcgagtgcgcctcgttcctgctcgtcgtgagtgccatccgacgcgtcaccgggacgggggcgctgagtcacctcgcgttcgtgctggagacgcagagggcgctcgtctggatgctgctcacgctcacgtgccgcgtggtgcactacggtgcgtcggtctcctcccttttcttctcctacatgtagagcgtactcaccttctcgttctacgttctagctgcaggtttcgacttcagcttccgcttcccctggctcaaaggcaacagtgtcaacttcaactaacagttgccttttttgtagccatctcgtcaagtagttgtagccatctctacgcatcacttccctctgatcccatgacgacccgagcctggcgatacgtgacgttcgacgcgacggggacgctgctgcggcccgcggagcccccgggcgcgacgtacctgtgcttctgggaggcggcttcgggccagcgattctcgtccgcgcggcgcgaggccgcggctgccgcgctctctgcgcacttcccggccgagttcagtcggctgtccaagcagtcgcccaacttcggctcggacggggcctcggcctcctccgccttcccgtggtggcggcgcctcgtgctcaacgtcatgaagcgcgcggacgtggccgactgcgcgcatcaggagcagagcgagcgcttcacgcgcgacctgtacgcgcacttcgcgcggcccgaggcctggacggtcttcgaggacgtgcggccgacgctcgagcggctgcagcggcagcaggtgcctatgggcgtcatctccaacttcgacgagcgcctggagacgctgctcgaggggctgcagctgcgcgacgcctttgacgtcgtcacggcctccttcacccagccgcatgtgaagccgcacgcgagcatcttccactcgaccttcagccagctgcaggggcaggtgggggagggcgctctacagacgcagcgcttcctgcacgtgggggaccacccgagcaaagactacagggcggccaaggccgtcggagcgcacgccaagctgctctggcgcagcgagcgcagagccccgcccagcgacgtaagcgaaggcgacgtcatcacctcgttggtggacgtgcagtaggaaggagaacggaaggaggaggcgttgaacggctcaatatactactgcgcatggctgtctgtagaggagaaagattctcgacggttatctctcctgctttggacggacggacggacggacggacgcctctgaagcgacgccacttgaagcttgaattgaagcttgttgacccctggcatctcgcaaagccaaacccggcggaagggtagagtgctactaccattggtgatggcgacggagctacaggaggacgtggcgcaggtggcgaaggagctgcagcgcgacgtggaaggcacctgcgcggcggtcgtgagtgagctcgtggcctgcgacgacccgacgcattggctcgagctgctcacgacgttggcggcgtccgacgctctaccggcggaattggtagaacgactcgactctgaattgctaccgcaggtggtgcagctgctgctgggtagagcgttcgacctgagtgcggtagaacgagtcaacgcgttctaccagtggacgctcagtgcagtcgtcaagagtctgcagcgaggggagatcgctcgcctggcgtgtctggccaggatcctggacgcccaccgccggttctacctgtttcatggcaccagtaacgacggcagcgcgctcaatcaggagaacgaggagaacgaggtagaacgtcgaggtagattcactgtaccagacagctccgagtacacgtcgcgctacttcctgcgcaacctcgagtactgggggacggtcggcggcttctcggcgttgctcgaggtgctgcgctcgagcgcgtcgttcgaagccttgcagtgcgttctacgcctgctctacgacgtcaaggaccatttgaccaccgagttcctgacgctctacttcccagagctgatcgacgccgttcgtgccctcatcacgagtctgcagccgggagaattctacgcgctgtcgagggactcgctgctggaggtggtgcaggtcatggagcttatcctggtcaagatccagcacgactcggacgctgcagcagattctaccgactcggagcgccaagtgtgcgagcagcgagtgcagctgcttcgcctcgagatctcgctgcggttcttccagagcaattcgctggagaagcgcatctacggactcacagagatcgtcgtgataatcacgcggctgtacaacgagcagatccaggagcaggtagagcccaccgccgcgtcgctctacgccaagctcaagttcctggtggactggatgcatgacaagcggctgatgcaggagctgctgggggagaagatgcacgtggagctggtcaagcgctcgacgtcgctcttccagttcacgtccgagctcgagcgcctcccgagcgagtggatcgacttggtctggagctgctaccacgcagaggcagacgcagacgcggaggaggagtcgcgaccggctcagcgccgtcacgaggcgttcagggcgacgatccacgacctgctgctggagatggcgacgttcatggagctcccgtcgttgaatcacctcgtgcagcgcattgaagcggtcaaggccaagttggacttgaaccaactggggctcttagctgcgattgcagggcggaagctgctggcggatatacccgacggctcccctgaggacgataattctactcgacggtcgctccgacagaggattttgatgcacctttggacggttgtgctcccgtcggtcaagtcggagaacgtccgtgatgaagttctgctgcgcatgcacgagatgcttcggctggaggtggctggggacgacagtgaggcgcttgagggcgtaaaggaccgagcgatggtggacgaattccttggtttgtgcctggaaaatatccttcggagggagaagctggcgacgtctctgaagctgttcacgcagttggcctcgttggttgtggaggtggatatcgctgtggcgaccccgagtcagtgcaacaagtcgtacgtgcaggtgctcctggacgagattgtcgagtacaagcagcgggttcgactcgcgctagacgcgtccaagtggatcaagatggaagacgaagagcgagcgaagctgcttgcattggtggatcatgtgaatgagatcaaaacccgactgcttgcactccgaggagcgtggattctggacgagtacaggcagtccgaagcctcgtcgttcactgaagagcagctggataacgtgtggcagctgatggtcgtggacgcgttcttgctggacgagggcgcgctctgcttccagtggattgaactctgtatgagcacgccactgcagacaagagcgatcgcccaggagaaggagaacgcgcgtccacctcgcgctctcatgccgttgggcatcgctgaatatctccttacaaccaagttcccaactctaccgggggattgcatcacgctctccaccttgtgctgcttccacagtatcttccgtcgcatcaacctcttgaaaggagggctggagatattcacaacagctgtgtcggtaggggattcttccctggttccgtcaccgactgagagaccaagtagtggcagcagctctgagggcgagaaggacgagtcggtggagctcatgacgggccaacccctcgtcggactggacgaactctggcaactcgctgttaaggcgacagactcggcggtagcagaggagacgatcactctactggcgagcttccacttggcgtttgcccccagcgttcgggatacggagctgccgttccagtgcaagatgcggttcctcgagaagtgcatggagttcatcgcggcggccaaggcggacgccgaaatggtgcgaacgcacatgcttccgtctccactttcttctgatcaactggataatgccgatcagagctattcaagtaaactcgctgccgacgtagctgtcgtcaaccgctgtgtggatctgctgcgctacttcttggaggcctgtcgagtaggagacgactctgcagccaaggaagacgaagagaagatgctgcaaaaattggagagcgaaggagtctgcagtactgccgacagcggcgatactaaccgcaagaagacgttccggatcgagcatttggaagagcggctcccatacctggagatttacccgtctccgatgaaggacccgcagtctgacccagccaaagtcggattccgtacgggtcggcggccgagctggacgttccggcagcagcacgcgctgctggacgttatcgttgacgcaaatgacgaaacagaggtggaagacgcccaaaagggaggagaagactcgactttacctccacgcccagcgagtcgcccctcggaggctgacaattctccattgaaagtcgacctcagaggcgaactcatgatgaccgaaagccccgtcaagaccaacctgcggtctccatgtgtacgagcgaatttgcggtggcctcaagctccttcaccacagcgggggccggatttaaggcctgaagatatcgaccaagcgctgaccgacttcacgtctggaggtttgaaagacgagcgcaattactcagagaagcagcagacgaggtacggcatcatgagccagatcctcgcgaaccaaggctcgcacttcgacgttctactggagctcgttgactgggatgaagcgacttcgcaacggacctgggatctgctctgtcgactgccgacaaacaacgaactactgcgtaaaatgattcggttgcgtagcgaggcgaaggaccaagaggctggaggagggcaagtagaatgggcggagctattggacggatcgaacatccacagactgctgtatgcgcttcgattggtggaagcgctgttgataccgatcgagaccgacgcgaagggcaaccaggagctgaattctggacgtcggcagtggagggagcgcttcgtccgcttgggaggcgccagacacttgtacgagacgctgctgaagtggcccctggagactgacaacagtgaggcaggagactcaatctcgccccagtacgctcagaacattcgagcgacgtgtctagcggcggtgatgcgagttctcaactatttcttccactggagtcgcatgagctcgttagagaagccgcagcgtgatagtttgtcgccttttgatgttcgtctacagtcctcgactttgcccgagttcgtcaagtcgattgaactgtcgtcgatgctgcaatcggccgtacagctgacggagaaattctgttctcgtaaatccgagtccttcttttcggaagaagcggcggaggcggtttactgcggcgtccaaatgtgctgctcgctgatccgcttcgcaccgcatcttacgatcacggtgtttgaatcggagattgacaatgaagtggttgatgatcgaatcacactctcgaagtggttgaaggcactgctagtggactgtccatcgaaatctacacgcaccctagcgtttggagctttatccgagatggcgatggcctttggcgtcatggatgtcggcagccccgcacgagcgctctatgagccgctcgtagtctcggcgtgttttctcgtatccgagaattcctttactggagtttcgtccttcgcggatgtggaggaactgtttgcattctgcagagtgctcttgggctgcagcgcacggtcaataacgtcttcagaggatgcgaatgaggctctagctgatagcctcatcaggagaaggattccaggtcgactggtgaggaacctgagtcgaattgtatctcagcgacaagaagctgccgctacgaggagtatcaaaagccctcggcatcaggaagagggggttctgggtgggtatttgatgctactggctttgcttacgggcatctccgagaagattcgcactgtgatactccattgtgacccaaagtgctcatctgcccacgattccggggggaagatgattcaatttgtccacaatgacctactttttggcgatatgagcagcgagcttgccactcccgttcctccaatatgcaagacaggtatcacgcgggagctcgcccagcgacttctcttgaacttagcattcccccagacttctgtcgatataagcagtctgaacggcgatatgatggatttactgtcgtatcttcacgaccatcagttgcgcgtattggagactgtgaacgcagcaggccgacaatggaattatgcgccggcggactcgttcctggataccgagaagagcacgcaccacgctggactggtgaaccccgggtgcatctgctacatgaactcgctggtgcagcagctctttatgatgccaagcttctgccaggggttgctcgcgttggactgcgcacagattaaagccgacaagtcgtcgtcgtcgtggcgggaggaggtggagcagctccagaagctgttcgtctcattggcatacacaaactaccgcgcgtctgaccccacggcgttcgctctctctcacaaggacatggacggcagctcaactgacgtccacatccaaatggacgcggacgagttcttcagcctgttgctggaccgactcgagatgttcatccgacccaaacctgctacaaaatctacagacactgagtcgagcgatgatagtgacatagatttcatggcccgttgcttcggaggcgtcctagtcaaccagattcttacgcagcagggtaatttatccgagcgggaggagaaattcttcgcgctgagcctagaggtgtccaagaagcggcacttgaccgagtcgctggagctatacgtgcaaggggagacgctggagggagagaacgcgtacttctgcgagcgcgtgcagcggaaagtgtcggcgacgaagcgcgtctgcatcaagacgctcccgcagacgttggtgtgccacctcaagcggtttgagttcgactacgacacgatggagaaggtcaagatcaacgattacctcgagttccccactgagatcaacatgtttccatacacgagcgaagcgcttgcagctactgacggagctactgcgagtgacgaaggcggcaaagcgataatgtacgatcttgtgggcgtggtggtgcactctggcacgtcagacaccggtcactactactcgtttatcaaggaccgacatgataccgacactcagcggtggctggagtttaacgatgaagtagtgcgcgactttgacgtggacacgatgggcgacgaatgcttcggaggagaggaagtggcacaaaaatgggatgcgcttcaaggcacctactcgcccgtcgttcagatgaagaggaggagcgcctacatgctgatctacgagaggcggtcagcagaggagcagtctgtaccagaatgtgaagacctgacgctgtccagccaagtgcagacactcgcgactcagatcatgcaggaaaacgcgcggtttgagaccgttgtgaacgcgtttgacccgatctacgaccgattcatccacgacctggtggagagcgccacgaggatgtcggggcaatgtgatcctcgagtggttcggcaagtgtgtcaactgggatgtcagttcctgttcggtatcagctcactacggtgtcgagcatctacctcagctaaaccttcaccagtggtgacgaatgcaatgacttcaagtcactacaaggtcagcgctcgtatagccttgtggttgtccagttttgaccaaaccccggacgttggggtcgaagaggagcagattcaactcagtaagtgggtcctctcggaaatggtggcatcgcccacctccttgtccgcgaagccggccttgcagcacgcagagagtcaacgcacgtggctgtttgacgtgctgttcctcagtcctgagagccccgagctggccgaaagctgcttcctggtgctctcagctgctgtgactgtcctagctcgagaagctgcagagcagcgtgaagacgcagagaagtcgctggtggcgttcttccgcgcgtccctcaacctgttttactgtcgggagcctcatctagacgtgagcgaccccgcctctggctgcgtcttgacgctctcgatggagatgcgggtggcagcgatgaagcagttgggcgcgttcctcgagaagtgcgtcagtaaggcaattggaggcgccgggcagggggcgaaggtgaccgaagctcgtgcgatccaccgtttgttcctggagaagctgcagttcgtcgaccacctcctgctgagtctgcaaatgtcctgtgaagtctcggaggtcgccacgtcttcagcgagtcccgctgtgtcgtcgaggggtatcgctccgttggcgatcgagacgagatcctcttctccattgcgcgagcacgaccttcgactgtgcacgttccagttggagatcaaactgctgcggtgtatgctgaaatttcacgacaagccagtgcctctgcctgtggactccacgctgttattcaaccacacagcactgaagaacgtggttctgtttgaactggaagagatcgtcttgccgattttgacgcgcgtcatctttgagagtgaagctgcctcgccaaagtgcgaccgtcttgtggctctgttaatcggggtgctggaagaggtgaaagacacccatgcagagaaggtattggctgtattcggggaactcttggacacggaagagatgcgtgcggagacttccgagcaagcaaaggaggtgtgggatatccatcgacacgtcttctcgccatcgcggggcatcttggagagcgtggcgtactaccgggatcatgggtcgcacgagtacacactgctactgctcgagtttgtgcttcgtcgcgccagcagctcgctgatgcttcaagagctcttcaggaatgagccaaaattccgtgacagcgcgacctggatccctcagtggctggtggaccacctcgactccaacggcacgatccgggctcaaatgcgggacaatatcgatgcagaagacagcgatgctacaagcgagaaggctcagggagttcaagaagtgaagaagttgttcgctgaggtggagaaggcgttcggggtgacggtgcctgcctacagtgaggaggtcacccacaacgttgatggtgacacgggggcgttgctgatctctcctccgtcctcacctgcagctataactaccgaagacgtgctgctggaggcgctcgacctggacggggagaaccaacacgactcgagccactctgtaaagcgcggaagtcgctggctggagaagatctcaaccgatatcggccccgagcatgaaggcgccgaagcggaggcccacactagtccgaagccaaactggacgttgcaccggtcacgcgaggagctgtcgatgctgctccggattgacctcgacacggcgcacaacaatgcgcgagaggcttagaaggacagtcaaactcgatatttttttactaaacaagttttctttgaattctgtagtatggcattagctcgtgtcggtggcgcctccactgggtgggcgctttcgcaattgattcggtcgacaaggggcttttggcttagagccctttgagaatgaagctgaattgggggtacggcccttatgccgtgcagtcttggccgacgagcagcgctttggtctagtggcggtcgaaagcttcatgtttcctagtaggtcacttccacatgtggcggatcgacgcagaggttgctggtgctgcagctgtgagaacaaacccctcgacgtctcgacttcgtctgcacaagcggaaaagtacaggaggcgacttcgaggtgacattgctgacagttcagtgttgctccaggttcccccccctcccccgctatcgttgcattcgaagtcgtcactgccgagacttgaaacggaatggcaggtagacacagaaggcgaacgcggtgtctcggtcgcaactccggaagcgaaattgtcgacaacccacggaccgacgggtgacagggagactgactccggccagtctgcatcgccttcagcgtcgaccaagtagagaaaactgtcgtcgtagtcgctcgagtattcgtcgccagtttgcccaccacgcgctttatcgcgcggtattcgcatggatccggacgtttgtttaggtcgcagttggcgtggattcgagggttgcttgccgccgtggtggcccccagaactcgagctgggcctggatctcggcatcgcactgcgtaaggacgcaaagtcgagcgaggatacctggccgtcagcattagtgttgccgctggatctgcagccacgacccgaggtggctgtaggcgcctcgtaaatgatggcaggcacaaccatttggatggtgctctcggcaaagatcttgttgaggtaactgcttgaaagcgggcgctggaggagtactccgctgtttgtcatcgagcttgacccaatactcgcagccacggggacagttggggccactctctccatcttctcgacggggtttttcaagtgtttgcggtggtgtttttgaggctggtcggaatcagcagcagagtgctcacttcttgcagaagatgtcggcttgatatggttttgcttctgttgctgttgctgttgctgctgttgaaagacttgctggcgtaggtctcggatgatctgctcaagctcctcgtcggtacgctgccgtggcggtgaatgcggttcactcagtgtagttgtcttggctgtggcaggagatcgaaagtgggtcgtctggttgctgtgagctgcttcagcgttgttgttgtttggcagtaatcgctcgccattgtcgctgcgagaatcatcggctccggtattactacatgtagttgacccatacacactctttccagcacacataattagcgagcgtttggaaggctctgactcgtgatcggctattccttccgggcgatcagcagcttccgacgggccctccgactcgaggcttgatcttgaaggtccggcaactttccttgccggtcgtttatcgggtggcttcttcgctctgcgggcttggccgtggatttgcgaggtagtcggcgcagcaaatggagctgccggttcttggtagtagtagtagctggcatttccgtcccccgatgctaaagtgtacgctgaggctccaacgccgacgctgccgtttccggtgcttccccaccgcatgggcaggacgccgaggtgacaatctgcgtgtgaaaaccttcggcctccgtgttagagtgttaattagtttgctatataaataccaaatacgtggatgcccaaaattggacgagcatgatcttgcagcgttctcctggagattacgctgctgccgtaagatcagtcaaagaagaagttcgggtactcgagctcgcgatagaacgtgaacgggtcacgatagaacgtggacggatcatgcaggaacccgagatcttcatcaccgaacaggctagggtggtgcggcggccgtggcgtcgctactagcgaccatgagtcttctagtgataaaaacggtggaggcatgggcgggcgcagtggcggtgctggcatccgcccacccgagcgccaacgccagtgagccggttggtgatgcatgaattcttggagacgacgctcgctgtcgaactggttccatgcctccattcgcttcaggtaggcacggtgctgtcgatatagagactttgggtggtcttcagagtgcacgcttgggtagtctgcacagagcacatagttctacagttaggggtggttggagggtctgcattcagaacacaatagacgtaccacgctgcaggaattgctgccacagctccgcatcttcttgcagctggtgcaaatactacaacggaagacacgaagtcaatgttctgcatcgaatcaatagtcagacacattcccgagttctcccaccttgctcgtctgcgtgactcgacaaaagtccgggatgctcaagaatcctccaatgcgagcaaggagcggctctgggagacggctgagctctgcatctgaagccaccgaacagggtccgctcgtggactcaggaaaaaagttgcgctccagtctaccgcaagaaaaagttagccctgggtaaaaactgaaaaacaggataaagataatgagttttttgccgctaacctccagccgaggatctccaggttgcagcgccacggtccagtgtacagcacatgcccctggtctgggtcttgctcatccgactgctgcccacgaggcttcacaaactcggacactctaaaaacaaataaaagtatcgataactttagctgaggccttccttgaataaaaggtcaactcaagtgagccacccactgtagactcagctggacgctctcggcggacgatacgaagtggacgaacagtttgccgcccaccagcagcgcgcgctcgtgaacgtcggcgtctcctcctgacgacgacggctgatagcgctgtgctggcagcagatttgcgtcccctgcaaagctctcggggcgctgggggcgacgcgcatcagggtcgacgtcctgcacagtccatccgtgctcctccagcagcgcttgcaccatccagagcagcgcaccagcagcggagacggcggcagtcatggtatctgctacgcttgcggcctgtgagatgtagtagtagtagtacaatactacgatgccacttttcagcagcaaccgctctctttcaatttttgtttgtgcgagggagggggggggtacatgtaagctgtacgtcaagtgtattccaagttttcattgtatagaactcgtgcggtgttgaacccagccgcaaaactatgatgtaccgccgcgatcaggacggggttggcttagttggtgctattcctgatgtagtacggcgcgtcctggaactcggcctcgcagtacgggaacagcgtgtcgtcgtccgagggcgtgaagagctccttgccggcgtagatcatgacgtagcagccggcggcggcgcacaccacgatcaccaccatggacgcagccttgtccagtaccgacatcttcctccagaacacgcgcaggtagatgatcagcggcatgagcaggcagctcgtcgtgtgggcggtggcgcccgtgaagtccaccaagtcgaggaaccgcttacgcgccagcacggcgcacaccaccagaatgacaatgatgcagatacgcagagcgatgtagtgcagcgcgttcttcttgtatggctcgtggagctgctcctccgtgatctcctcgccgaactcgagcgccacacgcagctgggacatccggccctcggacttctcgatcatgctggaggtcgacacctggcggttggacatttcgttgggcgtcgagctgcgcacgtacgatccctgcagctccaggtcctgctccacgttggcgcggtcctcctcactgttgaagcgcacaaccttggggcccttgtgcatgcccaggatgagacgctcagccatgtagaacggcggcatcatgagcgtcgagaaggcgatggtaatgtgcacctgcatgaacaggtacgccatcaccacagctccgcggtcggtggtgaagccaagcggggccaggccaagcggggctgacgtgctcacgatcgagtacaggatgttacccgagagctggcagccaccggcagtgtaaccggccagcgcaatcgcgatgaagaaggcagagatgatcaggatggtgatcaccaccacgcggggcatacgctgcggctgcgagtgctcacggtggagatccgggacgacaatggcagcaccgtaggccagcgcgaggttgccgaagcacatcagcacctggtgagccgagatgtcgggggtgggaatcgctccgtggccgcgcatcttccactggatgacaatgacggcaatgacgtcggcaatgaccgtgcccatggtggcggcgaaggccatgccggcactctccttgagcgtcgggatgaggcacacggggatgaccatgagcgccatgaagatgatccagaaggtctggctgaacgagtccgggaacagcacgtcgagcagcgtgctgccaagcaccaggaaggcgcagggcgacaggaggcacacgcccatctgcgagagagtcgtgaagaagcggccccacttgcccagggcccactcgcccaggtcaccgtacgtcttgacggacgacggcgacacgagcagcactcgcgacagcttgagcgtggcgtacgtgttggcgaagatcatgaaggccagcgcgatggaggcgtacacggggccggcgcgcgcgtagttggcgggcatcgtaagcgatcccatgcccaagaccgagcagaagaggttgaaggacgccttggcatcgtccatcgtgaagaaggccgtcttgccgcgctgggcagcggagacggtggacaccatggttagtcgaaggtcgggcgaggaagttcgagggtgccgttgactggtttcgctggaagtctccgctagaggagaaattggaaagtgagacgtcctgcatgcctatcttctagagctcgaccgaccgccaccattgcgctgcatgtccgttgctttaggggagcctaccaccagagccagcctagctctggtggtacaggctcagccaggtcgatccatcgcttgctcgccgctgaatgtccggccgccactgccacaagaactcgcggggaagcctgaactttgacagagattaactatgtacactggcgaaagaagatggtggggggatgtgcatggacacgtaaacgcctcgtctcttttcggctgtcacttttttttcgtctacagaaatggatcgcaatcgttttggaccaaaaaggcaccagctttacagctattaataaacattgcgcccctcgagccgttgacaagaacaatgttgtcattatacctgcaatcgtgcacaaagggcaggagaactaatggcagtctttgccggacaccgacggtgtcaacgcgtgctcgatgtttccagaatgatcgaaggttacgatgtcgtttacaaacaaactgtttacccaaacgatttctacataaaagaaccgtgcccttccaagcctccaaagcgcgctttgaatcgtaaacctggtcagcttgaaggcgcctcctctcgtcttccacttcagcgttaatcagcaatttgttctgttacgcgcaacttgtccggtaaagtcacttgactaggaggtggtatagaatttaaactatatactggaacattcaacactactgaatgtgctgtgtacagtaccggtacatgcactacaagtgcaaaatgcgcttttctaaactttgtgtgcgcaaagtcgttgtttgtcgcccgttttgttagaaattcggaacggtttttgcatgcaccgaccagcgacctggttgctgcaacgggactacaactacatgtacgtctccgtttgcagcggcaactgaagcaccggaacggttgagaagacgatgcgacgcccggacacggcgttgccatttcggatactgtgcatgtattacctatagatgtacacaactgtaaggaactgagtttagcgatcattatttttgctaatgttttcctttgtggtggttgacaaccaaccactggttgtatctttcagcgggtgggagttgtgcccatcccccttagggactggtcggggaatgatcgtctcagtctcgctcgtctccggtaagcctacccctaaggtgaatcgagccgatgtggtcggttggctggagaccgtcttagttttggtgtgtcaagctgctcgactcagcaccatcacactcgagagctcgcagccatggaaggcacccttactgctccacctgtgggcggcgctgaagctgaagacgctactgatagaagcgtaagcggcacggaccccaacgggagcggcgtcgagagagcacccccgcatggtggaggccgtggtggtcgcggggcaggtcgcggtggtcgtggaggacgaggagcttcgaccaggccagctgcatcatgaagcgatgatgacgtgagcgagttctttcgcctccgttacgcagagttagctgacaacttcaagaacacgaaggacatcaagcgcatcaaatatgcgtgggccgtcttagcatcaacactctctgttaaccagagcaaagtattcactgaccaccagtgtcaatctaaggtaaatatctacaatgtgaaaatatctatcggaatgagccactactaagttattaatcatgatgtgcggtgaatattatttaaagatgaagaacatgaagcaaaagtggccgtctgcgcgggaagcagaaggtcgaactggcaacgacggacccgtgcggcgcccaaatcactactccatcatgaaagactactggggtgatgcgacggggatgaacaaccgaccgcatcttagcacggaggacccggatacaattgctgctgctggtgacgctgcgagcgccgacgtcgctgccttcgccacgcctgcctcacctccccttcctcaatctccaacgccccgcaccatgtctggctccacggtgtcgtctaataagcgacagaagcgcacccagggggagtgtgtggaggcgggtttgagtgcggttgctaaaggttttagcgaagggctagaagctttgggccaaggacttgctacagtccgaaatgggggtgccgaagacattgcagctgctgtgcagcaacagaccgagctgttccgcgagcaaaatgagcgggctcatgcccaaaccgagcaactcttgtcggaaatgcaagctcagagcgagcgacttcgagtgcagaatgaaacgatccgagagctactggatttgattcgccgcgaccattaaaatctagctacacacgttttctagactagctcaaaagcttcggtaaaagccaaaatggactcacgttttctcgaagcaacatttcttagaaagcttggagtcatctcagagttgttcccagttacaacaatatcttcctcttcatcgaagttcacccgcgcgtcatcttcatcttcgaaagaagtgtcatccttcaaacccaacaaaatattgtggaaaacaatcgttgcagccacaatatccacagccttctcgacgcatttggtgttaatgcagcagttaccaattctgaagcgacctttccagagtccaaaagcacactcgactgtcgtcctagttcgggaatgtagataattgtagcgtagctgcttgcgtgtcaaaccggctccattattttccatgaacggcgtcatgatagccggactaatagcatatcctgcatctcctaacaagtgggtccccgctggcaaaacgtctttgaagttggagcctaaagtagacgcacgccatgttttttggtcagaccacgagcccggctgaatctccacgctagcaaagcgcattttgtcgtcaacaacagcctgcacatttagcgctgggaacatctttcgacaatagtatccctcaaagtcctcgggcctgttaatctccactagagagccgtctatcgcgcccaccactcctggaattccacctttcgcttggaatttgtcttgaactcgggtccattcatgagcatgccgcggaaaatgaacgaacttgcgcagcgaccggcgtaaagtcttgagaaatataccaatcacgtcgatagcccatgacttcgaaattgcaaacgcagccgtagtttctctatagccaccctgcgagccgaaaaaaaaaagaaaacaagcaaccttctcctcaaatgagtgctccttcataaatcgatctagctcaaaatctttcagctcctgacgcagaacaccacaaagccttagaaacgtagcttggctacacgttagattctgtcgaaaccactcgtcgtagaccgcgtcgtaaagcatagcctcaaactctagcggtgtcagggtaatgatgttctgctttgggttcgaaattgcccacacagcagtgtggaccgccgtcgcgagagcttccgtggccgcagcaactgcagcaacgatgctttcgctctgcaccatcgaaacgcagtgaagacgctcgtctccaaagtgagaccggtgatttagtcgtctcagattggtcagtctggagacgatgaacctagccgatcgagctaataactgaccaatcaaaaagaagaaaaaatgtcgccacatcgtctaagacgatcgaaagccgagacgagcgttccacgaccaggcccttaaggttagcataggaatctgtatctttgccctctgctcgacgatgcgtcaatacatgtagcaagcagtgcttgccaagcactgctcgtcgagcagagaccacattttatattaatacagtacatgtactcgtgtacagacgatcctctccgtagtgacagcctcgggagaccactttttatcacaatccagaggcatcacaatcataattgtaccacaatgacggtacaatatcgtttgaaggtaccagtatagtgataatgcgtacttgggagcttgtattgcacttgatacgtggttaaagcactagataaaagtatgtgttgtgctggatgctttaatatttacaactatatgccacgaagcgtgacgatacgccatccactattcaaatggaactgggagtactgcacaggcagctacaacgcgaaatctagtctagcgcccatgctgatatgataaatacacgttccagaatcacaaacatgtcaaatttaataactggtgtgcgggctttggcccgcggtgttcgcagttcggtcgctttttttttactgtatcccaaaacctgtagagtagaaaactttatttactactagtagtactatgtagtaatagctgtagaagagcgttgcgtgaagaagttcttgaattttagcacatgctctaatttttgtattgtgaagtaccatgcgtccaattgctgggtcgcttacgctgctcgatctgccgtggcggatctacatgaactcacactacagatattcatgctgcatacttgcacagcttcaagctgccagactgaacttcagttcatgttgaatgtatagtttgtttatttttctcgggttatcggggctatatgtccaattgtgacgcctgcaacttgattttgtagaattgctatactgacttccacgccgtttagctctcctcacttcgaaatcggctcgcaacaaacagtctgcacccactatcattaatcaatagcgataattttgtttactcaacgacggtttatcattgctgctgctgtgtcatccgacatgtacatgtagatatcgtatcgtagaaatgacagtcacttgtctaaactaacttagccgatatgacgacgaccctgctcgcttgctgctccgatacggtcgattcttcgcagtttacattgattgactgatcacccctctttattattgctgctgtctggttccgaaagcatgctctgagctcaaatgaatcggagtttgcgctgctatgctgtaatataattgctgtacaactgtcattgctgttgtttcaaatggttctttaaccgataatgcaacataaaaccctatgttgcattatctcaaacatccgcaggtgtgcagtacagacaatcacttgtgtcgagcattcgtaagacagtttgacgacaaatcaaatgtagcaatttcattggttaatattgtattatgtagtctcgagtgttgctgcatctcggctcgtaaattggactgatttatctgtgtgcgcattttgccccctttactagaggcagcgcacttgaaaaatgccccttgaaatgtccgggcctttgatcctgacgccatgcactaacctcctgctagaagatttaaatatacttgccaggaatggaatgtaaggacatcatagcacagttatcatgcgaccgtttgttcccgtagtggagcaatgtttcttcgcgttactggggtgaacgactgttgtcgttcaccccaccacgccaactctcctttctacagtaaagtactaacactacatagaagatggagattcggatagagcgcgcatacgcaaaccagtctacgctgtagcatcgacaaaaagcatggctgcaggcagtggcttagttgcaggagataccgagtaactcgccgatgccgaaggtcgagcccagcagcgatatggcgcgcgccgagcgcccgcgcagcagtgtggagctcctccgcacctcagcgtcgtaggtataagatctaggtattatcgccgttgcagagtacgtggttgcattttgttgctggactgtaatgattaggtaagagggggttggaggatctcgggaagcccactggcaacaccgttccctggctgccacgccttcacaactactatgatgtacgctcaagcataaaatttactacattaaaatgtacatgtagtaccgttacgagctatttgtccctcttagtttacgtctgccaacttcatcgtaactccgtgccctacaacggctgcacctctgagtggaacagctccacggactgcatgcacgcgttcgtgcagtcattatgccgatatttaagcttgctgccagcggccaactacaggcacatcgcttcgtgtgcgaacaagaggctacttaccctaccgcaccatgcaactgcatcgtttcggcgctcaacgttgccaccgcgtccgcggcaacgatgccgctgtgacctgaacacttttggccaattgtatggcgcaaactagtgtccgacaaactgtcttatgttttgacagacaatatgcaatgtagccactggtatacaaaaaccaagatgtagtcaaaacgcgttgatcggaaaacgtaagacgctttgtcttatgatagccattctggggctatgtatcgtcttacgaaagaacatgaatcctctttggagtgatatcccgaacagggataccctctgattagcactaataaaggctctcccgatgaccaatgatatacaaattcaagtcaaaactcctctaacctccggatagtgtttagtgatacgagattaggcttaatcactatccagagaccgttaactgtgtgaatgtccatttcttaaagcatgccgggtaaagttccaccacaactgtgaccatgaatggactcagatcctctggattcgcgcacatattcgcagttcgtaagaactgtcgtttgcgcctcttagagggggggggggggggcaatattcgtctcaccttccggacagtacagggattagcgcgcataagagcggacctcccaaatcatgtttcacgggtatacatgtacatgtacaatgttacagacaattataactgcgatacaatcatatctatagtttaattgaattcattataaaaaatatgagttgatggtccgctcttatacgcgctaatccctgttcctataaggtaccagtttatattagaattctcattcctacataaaaaatgaataatttaagggcaagatgactgcaatgtacaaacagcacagaactaagcttagcgcactcggcaaaactaggcatggattcagcgatatctacatgtacagccgttggctcaaaggtgtgcttgatttcgattgcaagatactcatcacggcatgttagagggatgtccaaataaaaaaaaaaacttacttttggtggccgacttattttaaaaaaccgaaagataaataaagcaggtgccagatttgccaacttaaaagtcattagaaaagaagtaggtctgggacctgtttttcccgggagatcagactttttttctttgaaaaagcagcaccacaatggcgcgtagcagagcgcgctcagacgacgatgaacctgacgtcatggacgtcgacagcgtcagctcaggagtgacagacgtcacgctggcggccacggctgccgcagtggaggtagaagacgcacttctggctaaagacggtgttgctttcagcccacaatagcggtatgttgccttccaacaggtcagtgctagcggagttgggtttgcgcggttgcctgaagctttgcaggggaacgttcctgctgctacaggcgtcgagcgtgagcatgccacacacaagcaagaggttgctgcagcccacgagcttgacggtgagagtcggcacggtgctccccggcaagatgttgtagctgctcagcgaactttgacagaatcagcttgttcttgaaacgcgcttcaattgccaaagccgtcagctggattgtccactgcatgctctgcacttccttcaccttcgccgttgacgccgtagacttcaccttcgcctttgacgccgtagacttctttgagctttgtttctttgcattgggctatgtggtggcggcgccatctgtgtccactgtgttacccgacgtcggcttcgtcttcaccttggtggtcttgcgagtggagttcttcgggtcggactggttacgccgactgttggccttcttcttggcggctctgcgcccagttgctttggccgttgatgctgcaacttgaccggtagctgggacggcaatcgcaccaagtacggtttcttcctgcggagatggtgtgtgacttgaggctctcgttctcttcaaggggggctcacgaagcccaggcgtcccagtgctggacggtgaattatcagaagactctccgttttgcgagtttccctcttcttggtataggccggtagtcctgctgacgctggtggctttgtcgtcccgactagcccggatctagttgcttgagccttccgggttggcataatgagtctgtgcgcgtcgccttcgtcttctactgcgagctgtacaccatttccgggtcgttctgcacaaatgatcgattcaaaacaatcacgtagaaaaaagggcagtatacacgtccgactccgaccagaacagtacacggattcaaaacaatcactttcattttctaaatgaacatgtgccagttttctggtacgttgtgggaaagactgatcaacaattgacactgcgtcgtatttatgttcccaaattaatactgagatcagccagaattttctcgaaaaggacaattgttgatctgcttccctctgtggtatcacagaaagggcagctgatcgttttgaaaatggctgtggtcattttgaatcgagaatttgatcagaagtcggccaagtatacgccataagtatactcaccctttttcttcgtgatcgttttgaatcgagcattagtacagaacgacccggaaatggtgtagtggccgccaccgcagtcggtaggcaacaggaaacacccgcagtcggagctttcaaggaaaccgcctctctaaaagaatgttgcagtatgatactccgtaggttacagcgaaaaagtcggttggatgacttttaccaggcttagacataacgccgacttttttcgcttactttttcgctgtgactgaagaagtcagccagccaataagttatcacttttttatctggacatccctcttagctatactttgtaagccccatgcgcccatggttatggagcggtcaccatgaaccgaatattatccccgttaaagtaggctacagcgtacagcgagcgtggcagagaattggcagcaggatgtatttcatcgtagtgcgcgacgtgctaacaaattcgtagaacttatacagtagaagtccgtgaagaccaggatcgttacgcaaatgcgcaaaatctgcccctttgcgtcacgatcctggtgagaccgcgtcaaacaaaatgatgcttacttagtacaaaccatttggagttttcgagataccgtacctcacccgaagattacttttggtatttctcatttggcactcaaattaccgttaaaaagctctcattttcttcaagactgttttcttcttgttaatattcagctgttatacgcgttttgattggctaaaactacgtttaaatttcaaaagaattgcctaaggttgtgaaatggcaatctaactgttgtagtgggttgaagtggatagccccaattcagcccgtgcagtgggcgacaggctgatcttcagattggcagtggcgggttgccactgccaaccaccgaggtcgatcgtaggcttgtagcccgagctggcagtagggtgtgccaatgtttgcaccctttacatagtggcacatactatacaactacccctggaagcggatgatctgatacaaaaggtcccttcaaagctgttagtcaaggagtaactatgctgtatagactgtaccagtgtaggtttgctagaaccaaccatctaaactctgctgctgacagtgcgccatctctaatctaactcacttcgtcttttgacgactcctccacactcctctcgtcctagcctctccgttaatctcgcaacaggttatgagctcaagccaagcctccagcgacgacttcaccagactcatcggagccgacaacttcgacgtctggaaggctcccgtgtgcgcagccctcgacggaaagcagctactcggcttcgtgacgaagcccgactacgatggtgtcaccgaggacagcgggagcgacatgtccgacgccgacgacccgccgaagaccacgccggcaagacgcctgagatcgattccgacgccgctggctacgacgagagtgacgacgatgacaagtgacacgatgcggctccagatttctgcccgagccccacgttgacggcctggttctagctggatccaggatccaagtggcggaagagcctggatatgcactcagcgccctgaatcaggatgatcaaggtgtgtccaggctggaccaagattgatgaccctgaaggctgccagcctggaccccccccagccaagatcgagccagtcatgccacaagagccgaagacgtgcccgaccaagctcgtcgatgcctaagctgcctgaccaaagcccgtgtatcctgaatcgacaacgtgtatcccgaatggacgactctccaagctccaagatttgaccatagaaaccaagacattaacgaccgaccaagccgaccgtccaagatctgctcggcacatggaaccttgaactccctcccagctgtgctgccgatccccgctggatctttgcgactcaaccgacgacaacctatactgaaaccaagataaaacttccaagactgcatgttacgattagtgatagcctacaaagataagaccaaacagagttcgtttttcctgctacatcgcaagtgtcttcggttgggagccaggctattcagagctggttcagactcaaaggagccttgtgtctttggttctccccctgcagtcagggcacctcggctaagaacgtaagggtcgtgtgtggagctctcatagtaagtatcaaaccaagttaaggcgagtacctgagctgtcgtgcggccagggttgataagctttatttcatattctagttggggtgtttgtcctggacagcactgccatttcatattaagctactcctagggcggttgaggtagtcaccacctagtgatttgtcgataggctactgagtgataggaaggactgtgttttgtattgattcggctttttccctcttgattgagggtggtgcgcgattgattgagggtcttggacttgccagtgtcctggatctaccatctttgttgactggtgcgtagggcccaccgtccaagggccaaccaaagaataagtgacggttgtgtgtattgtatatttgtgtataactctgtattgttaaggttatctctccggatccaggctatgaaagctgcgttctgaagtgtgcgttagctccgcttcctggtcctagcgatattatcctgtttcccgcaacccacgcagtgcaagtctcacgttcgaagacaaacgacacccaaagggattccacaaaaaacacacgccacccatgacaacaccaagtgctcgtccagggttgtttcgaggggacaagtctagatccttttcgggccactgtacacctgggcggcaaaaggcgttcacccgcctcgcctcagctggtgcgcgtgcccggattcgaatcctttgggacttcactgagttgcggttacatttattgttatgattgaggttgcgaagtctactaaccctctgaccgaagcgtttatggcgagagaaaacggagaagacatgcgcgaggaaggacgcgatggcgagggacgcggtgatgcgtcgcgccagtcgcgtaggtctcaggggctgccgccggaggagcacgcgagcctggacgaggttgtccgggcagctcggaaggcaggcgctgcaaagcacaaggcggcccgcgaggcaaaagccaagtcgtcggagaaggagccgactccagcaccgtccgtccaggatgacgcgcaccaagtgtccccggatggcgagctggacgtccaggatcctgacccgaaggctgctcaagatcagggtgagtccgtccaggatgagcccgccaaggcgtctgcgggaggcgccgatgaggttgagcccccggcggcggatcgagtttcggactctccgctgccggatcaagatgcggagtccaaggagaccccgaacctggaagacaagccgctgccgactgtccaagaagtggccgagcttgaggactcgcaagagacctcgccgtccacccaagcgaccacgacgaaccctgaatcctcggtccaggaagcttcgaccaagacgaccccaaatcaagtcgtcccagaccaagctccggatccaggctcgcttcgcctgaccagaggttcaccgaggtccaggaaaaggcgtacgtcgcgcagcaagtgtccaggtgggagcgggtggagtccgaacgcgtgaccccgcccgctgtagagtactcctgatcgacacccaaaccggatgcacagccctggatggccgccatgttgaccacgtccaggtacctcagtgcgcgagcactcttggaggaccaggatggaggctggatcgcggaacttcgtctcgaccgtcgggacttgagcaccgcccaggatctcatgactgtccaggttccggtccagatgctgacgccgcgggagtgcatggccatcctgcaagctctgctgttcgaagccggattcaggtttgataatctggctccggtctggttcagggcgagagcggccaaggtcgctccagccaagctgggagtggtcatccaggacgtactgcgtctgctggccctggaaccggtggagtggcgttcacttgttgttggcgctacgttcaagatcatccctgtcgtgaaagcgcaagcatcagagactcccgaatctgaacaagcatccatccaggactaccacgctgaagatcaagacggagatctattgatgacggattacgatctaggcctactcggccgggaatacgttctccgcctcaagctgactggtcttcgttcggcgaggagtccaggatggcgagcctgaaccgaagcgccaacaacaccatccagcccggccgccgcttgcgtcgctgccgtccgcgtcgaacccgtctgaattggcgtcgcccaggacctccagtcggagtgatgtcgtccaggcggaggaggccgccccgatccaggaaaatgcgacttcggaccctgtcacgagcttggtcggtacttctggatccccggaggcctccctgtacggaacgatgtctggatccaacccatccaggaacagctccgagagctcgtcctcgatcggacttggattcagcgctggcgccctcgtgccgccctcgacgtacggtccgatgactatgtcgatttaggctgggcgtcctggattcgcggtcggtggaggcgcggtgggttactacgtgacccagcgtgtcgtgtcgaagcgcgccgtcgaggtagaccaggatgacgtcgagatggccgagtccgttcagacctccaagtcgcggacggacagatccaggaccaagtcctcgtccagacaccgccggcaccgctaccagtccgaatcaggctcggagtcgtccagcgagtcggtgaccagcagcgccaggagccgtcgtcaccgacgctcctcgaagcggtcctcgaagtcgaagcggaggtcttcgtccaggcggtctagccggtcaggacgctcgagacgctcgcacggatccagggcgtccagtcggtcgtacatgtcgatctcgtctggggtggccgaagttgcggtcaccacgatgaacgacgtcacagcgcctacagaccgccctggacctcatggccctgacccagcaagccacgtcggaagcccagagccagcgtgaagtcaaagcccagcgcaagctggaagaggctgaacgccggatccaggagtccgaacgtcggattgctgctgccctggctggaggtccccgtctggacccggtccaaccagacctggacgccgtcgtccaggccgctcgtgacgaggccgcccaggctgaacgtcaacgcctccaggccgatgccttgaattacgatcagcagcaacaggtcgaggtggaggcgcgcatggaggccgagcgcgcagcgtgggccgcggagacaaagaggagtctggatgcccagcagaacgcgttccagcggaggtaccaggccttggcgtccgagcgagacaacgagcgagaagctgcgaagcacatgaggcgtttccaagcgtcccaaattcgggaccttcgagcaacatccactcaggttcaatctggtcgggcgccattcaaccctgattcggtaaccccggttaagtggaagagccaaaccctgaatcggcaaccatgaggagtggcgtcagtgcgggacagatcgccagtaacggtgcacagccgggaccgaagaacatcgccgaagctcaacttcgtgcgaccatcccggaagtggatctggccaggcttacttccagcactaagacccggacccaagtgcctaaggctgaaccgacgcccaaggcgacgaaggcagaggtgcccaaggcgactgttcccgctaagtccggatccaagccgccgccgaggaagcccccgcccaagccatccaggaagaagacccagaaggatgaagatccgtcgtcaagcagctcaagcagttctgactcaagcgacagcgattccagctcaagtgattctgacagcagtctggacgggggcgacctggtcgaggcctcggccaggaagatcaaggcgggggaaacctcgttgacgatccacccctatgtgaactcgagtgcgctggagaagttcgacgagaaggcgtccctgggcgaccgccgaagctggtggggaaggttcacgaacctagccagccaaggaggctggtccaaccgggcccagatcagcgagctcaagatgaagatgtcatccccggtccggaattggcgtgggcaactcccgaagcaggtccagaacgactggaagtccctggccggcgagttcaggaagaagtatctcaaggccaggacccccgactctgagcgctactgaacgatgaagcagaagggtggcgagtcggctctggagtatttctaccgcctgaacgacgcggctggcaaggctagcatcaactaccggtcatccaggaaggacgtctcgcatcacgttaagcgtttcatcaagggcctgaaagattcagacttgatgcaggccctgaagagtcagcgattcaagcggatcccgggtctgcagttcgccctggaacaggatgaagaggtgacgctgggtgggggttacgatacccctccatccaggacgcgcgacttccgagcggacaatgctggtcaggggcgattcaagcctcgccggaccggacgtgcttttgtcggcctggatgggagcgattcagaccaggatcaggaaatccatgtccatttcgaagatgaaccagagtccaagcctgattcccctcctgctgcggtgaacgaaaacctgaatggagtggttcgagacgccatcgcagagagtacggctagggaggacgagatgaggaaggctgttttccagatcttggaacattcaggctggcgtcccccgaatcaggatttccggtcaggggcgaagtcacccaggcagggtgatcctgaccggaacaacctggatcagtccgactattgtgaaaactgttacgagtttggacatcgcgctgaacgctactggatcgacctggtttgtgaccgctgtggacgcatggggcatccgactgacagatgccgagccctgccctgcaagaagtgtggcgagttccacgttggacgatgtgaagagcacaaggccatccaggctatcatggacctcattcgcaagggtgccctgaaagacctgcccaaggccatcctggatcccatccagggtggtcaggccgatcctggtcggtcgttaaacgaataagcccgctggatggggatccagtacgcgtcgggcttaggaagaccccaggattgtgtgtcttagtgtatgtcggccctgatttgaggatgaagaaacgagataaccaacaatgcatgacttctataattcaagatggacccgctgctgaccctgaaccaaatcggcctgaatcgcagaccctgaatggagaagaccggatcggggaagccccgaatggagagaccctggatgggccagtcgaattatggctgaatttcggtgaacgatacggatggtgggaaggtcacgaagcagacgaaaatagtcatgatgttgcgatggtgtatggtgcagtgaacgatttccgaacaagtatcctcttggacactggtgcgtctgtctgcatggtcagcctggatctagcgcgtagactcaagctgaaactgcagatgcacagacaaatcaaggtgtctggtctagggggcgttccgacttatatctctgcccgggctcgaatcaagcttacccgcggtctccgagtggtgtatgtcctggatgtgtgggtcgcgaacattggagaaggattggatgtgctgttgggcatgaacttcatgtattctgctggagtcaggatctgtgtgcgagaagccctggtccagctcccggatgaggagactatcgtgatgcggggtgggccactgaggcgacgtccagaattggacctgcctgtggcccccagacgaacgctttatcttcagccaggagaacacgcgatcgtccggatcgagtatggtcgagcacaccccgaacgagatgtggtttgggccggccggggagatcgctgggtgacacaggtcatctacgcatcccggtcctggccggtggcgattaaggtgatgaacatttcgttgtagatgatttggattgactctcggaccccggtagccaggattgtggtttacggacactatccggcttacggtcgtttcgtccgacctggacggggcgactacaaggagaggcagaagttgatgcaggagtgcgccctgactccggaggaaatagccgaggctgaccgacttgatgagctggcgaaggcacaggcaccatcgcccgtcccgaagcaggtttacaagtggccatccaggctccggatcaagactggaccggaaaggaaggaagagaagctggtttgcctacaacaaacaccgctcccccaggggcggccatccaggatcatgtgccatgtcgctactcaaacgatcacgactcaagatgtgtgcgttcagaccgatgaagcgtagattcaggacaacaatgcgcagggaaccgtggatgaagtgccggataccctggaagatgtgacagactgtccggagaacgatcgtggtgactcgtcggaggcacacgagccggatgtcgagctctccgccgtggaggatatctcaacgcagactgagattcaggaagagattcaggaaaacgttctggatgggatccaggatgcggtcgaggatgacactcgcatggaggtagagtttgatgatgaagacgagttggaatttctgaccccggccatgtctggtactgtaacagggttacacgcacaagtggctacagtcacttgtaactctaacagacacgacgtctgttagaggttcgaaagacttcctcgaccttggtgtagacacaccaaaggctacatacatttacgaccaccacgacgggtggtccatagagacttaggattcctattggctgagagcagcatctcttagccaatgagcgacatgcatagcattggaattccgaagctgcaattacacttgcaatgcaggaggagtttagcctgcggcaggctaagctgcatgcacatgtgccgaggccacagccacgcccggtagtgaggacgggaggcccagaacccttggacctctcgagtgctgcaactgctggaccccagcagtcgcagggaaacaatgtgcgatgctaccgttgcggtagagtcggtcactttgctcgggagtgcacggcccccgtgcaccagcagggtggctatcgcggcggtgccgggcaccgtcgcaaccaaacaaaaacgctggatgccagtaggcgcggggcgccctactggtaatgcagttccgcgtgtcgaccttggacacgcgacactgaggactgcagcccccagtgaggttcatcctcactgcaagaaccaagatgacaaccctgaccttgtcatcctgaatgtgaactcgatgagagcaagcggctctctccgtgctttggtagattctggcgcgtcgaagaactttgttcgactgcgaagtctatcaaggcttgacttcgaggatttaaagatacctcgaagtatgttggaagtacgactggcaacgggtgccgtcgtgaagaccgagaagcgcatggtacgcgtgcgcttcacgtatgaagatcaagagtttgtcgagacctttatcgtcctggatctggacgataagtgtgacattgtattgggcatgccgtggcttgcacggcatgatcccgtcatcgattgggagaagcgcactctcgtgcgcttcggtcgcgacagaggaacagtgagcgatggccctgttaccgctacgcacacaccgacagatgcgcgcgactccccactcgaaacagcgcctaacgccgctgtcccggagcgctctgggcgcgcaagagtcggcgttgctgccgacaactaatgaaggacatgtgttgacctcggagatcgacacccgcttttcagcgaatcaggaagagtctccggcctcaaggggcacggatggcgcaagcgagtcacacgcctcagccgtggaggctgacgcgaatctgattggatcaggtctggccaataataagggccaaggtgacataacgccgtcgactccggaagtcgatggcttgggtgaatttgattcgtcggctcgggaagccgacgcaccctccgtaatggagggctccgccaataacaggcgtcgaggtaaggatggcgtgtcgactccgggagtcgacgctgcaagcggtgcggacggttgcaaacgttccgcaccggaaaaacttgcatgctgtcgtgcagccgggctgcacgatgaagcgccgggcgaccaagccgggcttgaagtcgctcgcccgcgggaggaacccgccggcggtactgaagaagaacacccgtccacggctgggcctggacggggtcaagaaccaagcggagccgggctccacaaaacaagaagacggcgcatgcgaaggtcgctacgcaagtctcggcctggggccgagacgctacaaggaatgtctgccgggcagacggaggctgagaagccggacgtggagacgttgaacgtcttgacgcgtacctgtgccgggttccggtacagggagatgactctcgctaaccctccgacgcaagtgtcggagttgacttcgcttccagtcatgagctggaagcgcttcgcgcgtgacttgcacgatggacgcatcgagcaaatatgcattctctcggacaccgagagaacgaagagcgagaatgaagaactgaggcagttcttcacggagaacaccactgagagcgaggacactctctgtgcgaagactaagaagaagcgctttgaagagcagagctgggactcattgaagacgagcccctactacgagatcttacgggagtacgcggacgtactcccggaagagattcctgcggagcttccgcaggataacgcatccagcacgagattgatctcgtgccggggacgaagtactgtgtcacgcggcagtggccactgccgcgagagcaggtcaaggcgatcgacgacttctttgagagtcgtcgcaaaactggacaagtgcgggaatcgaaatccccgcacagtgctccgacgttctgtgtcaagaagccacagggcggttggcgcatcgttcatgcgtacaacaagctgaacgatgcgacgataccggcacagacaccgataccgcgaaaagatgtcatcatcgattcgatggccaggagcactatctacagtgctcttgatctgcgcgatggattctatcagatccgcatgcgtgagagcgatatccctctcacggctgtgagtacgccgagcggcatgctctgggagtggctagtgatgccacagggtctgaagaacgcccctgcgaccgtcaacaggtgcgtggcgcacttgttgcgctcggtgcgcgacttcgcaccgagctacttcgacgatgtgttcgtccacagccgggctgcggacgggatgagcgatgttgagatgcacaacgtgcatctccggaagctgcttgcgctcatgcgcaagcccaagctctatgcgaacctgaagaagtgcatcttcggggcgagcgagatacccgtgctcgggtgtctcgtcgggaagaacggtgtccgccctgaccctgagaaggttagagtgatcaatgagtggccgacgccgtcgaacgtcaaggaactgcggcagttccttggcttggccacatacttgtgcaagtacgtgaaggactacgcgggcatgatacgcccgctgtcacagctcctgaagaatgacgccgagtgggtttggactgctgagtgtcagcagaccttcgatgcagtcaagcggggcttgactaaggcgccaatcttggcggtggccgaccaagatcgtccattccacgttgtgtgtgacgcatccgacttcgcaatcggatgtgcgttgatgcagcacgatcacgagggtcgtctactaccaatcgcgtcagctgaagccagctgagcgcaactacccggtacatggcaacgaactccttgccatgaagtacgcactcgcgaagttccgagtgtatctactcggaagcaaaccgttcgtggtctatacagaccacgcgtcactgcggacagctgtgaagtcgccgcacatctcgcaacggatggcgagatggctctcattcttcgcagagtataacttccaggttgagtacaaacccggaagactcaatgtggtggccgacgcgctctcgcgtcgacctgactacgccacgactgatgccgacgtcaatgccattgacgccatgcgatcgagcaccccgacgtcgtcactgttggacgacgtgaaggtcgcgtacgcgcacgacgcggacgcgaagctcttgctggcctacggctcagcgccttctgacaaagctcgtcagaagctgccgaagcatcttcgtgctcgtgcacaccgttatcgggtgcacgaccggtttttactctatagtgcagtcgacgacaacgcggaccgcgttgtcgtgcccaatgcccatgacctgcgactcaggatcatgtatgagtatcacgatgcaccgcctgcggggcatccgggccgtgagaagacataccttcttctcacgcgagacttctactgggcccaccaatataaatgggtgcgcaagtacgtccctgcttgcgaggtttgtcaacgtgtgaagcctgcgcctttcgcgcaggctcccttgcagtcactaccgactccacgggagtgttggcagtccatgtctttggacttcgtgttcggtcttcccccggacagccaggggaacacgggcgttgtggtctttgttgaccgcttcagcaagatggtacatcttgctgcggtacccgctgaagtgactgcgaagcagacggcgcgtctgttcgttgacatggtgttcaaacaccatggcatgccgatcgacattgtgtcggatcgggacccgcgcttcactgcacacctttggcaagaagtgtttacacttcttgggagtcaactttcgatgtcgactgcggaccatccgcagacggacgggcagaccgagcgcgtgaaccgcgtgctcgtagacgtgcttaagagctacgctcactcgttccaacactggagcgagtgtctgccgatggcggagttcgccatcagcaactcggtgcatgccgcgaccgggcatacaccgttctacgtgatgccatcaggcacccacgcctcccgagtctactcgggatggtggctccttccttaagtgggggaggatctacgactgcaacgcagcagccgcagaatgccgctgacacttgcacagtgtcagccgcgactacgcgcaacaagaagaagaagattggggattgtgcagggcacagacaccgcgaagacgaacgcagaggccgggcctacggctagaaacgagctgaacgagttcagctcgggcgcaatcaacttcgtgcagcgcagacaagccgtcattcggtttgtccaagacgctattgcagcttctgtcgactgacagaagctgaacgcagacaatgttggtaggggcaacactaatgaattcaagaagggttcattagttttgttagcaactcaaaacctgcctaaacatgcagtttccgacttcggggcgagcaagctcgctccgcgcttcatcgggccgttcacagtgttggcacgccaccgcaacgcctacacgctagatattccatcgagcatgcgcctccatccgaccttttacgtcgggtggctgaagccataccagctgtacgagccacctagctcggctggcccgaagcggatgccccagcgggagcaaacctctgctccagcgcgtgaacgcgctgggccaagcgtgcgacgcgacctcccacgtcgacagagatgtccgacgcggtctgcgaggcctgagcgacttgagccctcaggatcgcctcctcctgcttcagagcggcgaactcacggctctgaagctgctccacagcagcgactcgctcctcgagcgccgggccaaggtcaaccccaggttgatcatacccggggcgtgttcccaccaccaccgcctccgatccgcgacgcccgcggctcaacacgctggattgttgagcgtattgtggaccatagtatcccgaaaacgaaccggcaaccggttcgttatcgtattcgttggagagggtttccgccccaccaagatacatgggagccgcgggacgtcctgctgcaggacgttccggaaatggtgagggcgtacgaagctcaccacgcactgccgacgcgaaggtagtgcgagcgctgtcgtcacctacagcgcccgaggtcccacgatcgtcgcgttcctcgcgtgccaagaacttggcacggagatccttgagactctcaggtacacgaatcgtcgtgtacccgtttaggtcgcggtcgctgaagcgcaccgcacccggaagacacaacgtgcactgatggccttcgagcacagcgcatggaataccagcgtccacagaggatctgtggagctgcgccaacctcccgcgcgtcgagaatgtctcgaagcgctcacgggcatgcttaacccgctcgcggtaagcagccggtttcttgttgaagttctcaacaaaagcattccaactttgacaaagtgcctgccactcaggcactttgctgcgagaagaggtcttcttgctggataagtaccggagctcgtggaagagcccgatgcagtagtcgcacctttgattcgttaacggatcaaagtgctgctcctccgcaacagcatcgtcgtggataccgctgcatacgtacagcgggatttcatttggaggcacagtgttgctgtgatctctgacgcagacggcatccacggatcgcgcgctgctcaggcagcgcgcggggaacttgaagacgccacctcacgcggggagcttaaagccccagcagcagagagcggagtgtcgctctcgccgcgcgaacgcttcgagctcgaagcgtccgagtcgtctccttcacgagggcgtctcgacccggcttgcgggtcgagactatcgccgtcgatagactcattgcgcttgctagaagaggcctcgccctcttccatcttcacgtcatcgtcttcgtagtcaacggcgtcgttgactacagaagaaccttcaaggacaatctctggttgagttgtccccgccgcagccttggtagcaagagcgtcacgctttgctttgagacgctcgcggtacacggggatagagagaatctctatcccagcggaggacttcccctctgctgcagcgtcggtcttcttctgaggcgagctcattgcggaatgagctcgagctttctttctcccaacgtgaagaattgacgaatggtcaatttcctgattgacgtgccgtgactcggcgcgtctatccttgagggggggatggtgtaacagggtcacacgcacaagtggctacagtcacttgtaactctaacagacacgacgtctgttagaggtttgaacacttcctcgaccttggtgtaaggtacaccaatggctacatacatttacgaccaccacgacgggtggtccatacacatttaggattcctattggctgaaagcagcatcttttagccaatgagtgacttgcatgttagcagaatgctgcgaaccagccgttggcagattcctagtttagaatattacatttagaggaagtcagaaacataaaacaaaaatagcagttctcatttttaacccaaaaatattatttgggtcgtttatttagatcaatctatactcggaggcccgagtataattaactctagcttaaactacgctacgcttcctcacacacgtgcgcgcacgtgtaagctaaagtagtgagccaaagtaggcccattacaggtaccccgatcgagcaactggagcaggcgtacgcccgttgtatgcggttgaatgcagaagagttggattacgagccagaggtctacatccatgaaggcagtgacctgctttcccaactgcgcgacgaattggccctgattcccgaattgaaggatctcagtccagagtgtgacatcgagaaggctgacgttggggaaccgggacgaacgacccaaatcgaggaagaacaactgcgtgacatcctgaacgcgcatcgcacaattttcttaggtgatggaaacgcagcgccggcacctgctcgtgggatcgtgtgtgacctggacgtgggcgatgcgaaacctgttgctcaacgtccgcggtcgattgccccgaacctgttttccaaggtgtatgagctgctcaagaagctcctggaaacaggcctgattgagacgtccacgtctgcctgggcctctcctattgtcatcgtcctgaagaagaacggggttgacttccggatgtgcatcgactacggggttgttaacagtttcatccaactttcgaattacccgctgcccctgattgacgaccttttgatcggtttcgagagtgcgatgtggtttatgagtctggatatggcgagtggattctgggctattacgatgaccgagcgtgcgaaactaatttcggcttttgtgtgcccgctgggatactatcagtgggtacccatgccattcggcctgaaaaacgccccgctcatctaccaagccatgttgaacaactgtctctggggatttgtgagattgccacccgaagaagaggccaaggtggatccggacgtattggagttcctgaagctagacccctccgatcaggatgaagcggagtggattcaggctgagcagagggtgcctgccctgaccgatgtcatgacggtggtcaagcggaacattcccacgccaccccagatgggatcggtgcttggtcgaagttcctatatcgacgatattgctcatggggcggtcacctgggatcaactttgccaggaactgaatgcgctgcttttccggtaacgctactgcaacatctcggttagcctgcctaaaagcgagttcgggaagttgtctattccgtacctctctcacgagatcagtgcagaaggggtccgggctactccgaagattgcgaagggtgtccaaaacctcccattcccgtcgaccctgaaaggggtccaatcgttcctggtcagcctgaatcactaccacaagttcatagaggatttcccggtggtggcggctgccctgtacgagttgacggatgaccagatccgggctggacgagacctcggacaggctaaggaggcctttgagatcctgaaacgcaagaccgtgtcaactccgctgctcagacccccggaccggacgaagccatttgtggtcattccccatgccaaccagtgcgcagcttgcgctgtccttggccaggaatatgacggggtgattcagcctgtccggtacacggggcgtgtcctgaacgacgcagagctacgttaccacattgcggagaaggaagtcgttgcagtcctgcgggttctggaagtgttcaaaactatcgtccagggcgccaagagtgtggtttattcaaggtattctgtcctgaattgactgctcaaatccaagtcggccgacggtaggtgcgtgcgctggggagtcatcctgtctcagtggaacctggaaattcggaaggtgcagcggaacgaggacggacttgctgccatcatgggagcaggcatcacgccacgcgaacacctgaatcaggttgctcaaaccctgattccggccaaggggcgcgtcaaggcgccacctgtaatcagcgtggagatgctggattcagactaccaaggatatgtcctgagcttcgacggcgctgcgaaaacatctacgcgccaaggaagttgtggatgcatcatttgggagcttccagactggcacgtcctgaccgcacacggtttcatcctggatgacgttactgggaacgacgccgaatatcatggcctgctgaagggtctggaactggcgtctgaatgtgggatccaggatctggtcgtggtgggcgattccaggatcgtgattcagcaagttcagggactgatcaactgtaatcagcccaatttacagcaccaactcgccgagtatgaagttcagaaggacaagtccaagtcgatcaggctggtccatgtcaagcgtgactacaaccaggctgcagactacctgatgtccaagactctggcactgggtgagtcgtggcaggttcattacgcccaagagcttcttcacctggaacgtgtgtcgaagatccaagaaaagctcatgaagacggttgtggtgctggacgaatcagcccagattgaggtcaaacaggacggtccgaaccagactgctctggttgccatccaggaagacgagggtgtttcgggcgtggattcagacccgttgcccctggccgctcgtgtcatggcagcggtcactcgaagtcgagccgccatggagtccgaggatcgggccccgatgggcccactcgagtatcaggctgaacggtggagacgcaccaaagcgcatcaggatcaggacagccagctcgttgagatcaagaagtttctgaatggtgagttggaagactcctctcaccctcagatacggcggatctccaagcaggctgaactttttgccctggatgcaagaggtattctctaccgcctgagtcgggctactcgggatcgacccagggacatgaatgatgagctcaggctagtcgtgcctgaatctttgagggcgggcgtgctgcgttacgcccacgaagattttcagggtggtcaccagggtattatccggacccacgagaagctccgatcagagttctattggcatggtatgtacgccgatgtggaggcgtgcgtgaaagagtgcacagattgtgctagcggcaaggggcgcccgcctaatccaggcccgtctcccgggaacattgaacctaggcgacctttcgaggttgtatctatggactttgtgactcatctgtccaaatcagagcgtggaaacacgttcctattactatttcaggacgacttttccggatacgtgatgtgcacgccgatgggctccacaactgcccaagatgttgccgaggcctacgaagagcgggtattcaggaggttcggggcgagttcaatgctgcgtcacgaccaggatcctagattcatgagtgaggtcttcactcggttccgggacctcctgggtagtaagcaacgagccaccctggcctaccggccccaggctaacggccagcaagaacgctctgtccagaccgtggtcaggagcatccgtgcctacgtggccgaggtagaccagagtgactgggacgaacatgctgaaaggttgatgttcgccctgaatacctctttcgatggaaccaggctcgacactccgttctaccttgtccatggatgggatgcccagggtaccgtgtccgccatgctagggcctaaaccgtccagccttcctgaacgtacggcctacgagtggcgaaggaagtttcagcgagactacagctacgcccaagcgtgtgcggaggacttgcagaagaaagccaagagggcccgtgcggaggagcaaccaggaagtggcgtgaactgtcggaccggatcaaggctggattcgagattggagacgcagtttggctctatatcccgaaagtgcagtctggcttgagtcgaaaactcgctcacctttggcatggcccgttccgagtggaggagattcaggacgatttccgggtcaagctcaagattgaggataacggttaccgcgtcaacccttgggtgcacatcagccgcctgaaaccacgagcacttttccaaagcggccgaccgctgaaatctaggtggaagaagatgacgactttgacgcggcactgtcaccagaagacagttgggaagcagacaaccagaaccaggagtatgaagtcgagaaaatcctggatctgcgctggacgaagcgtacccgcacgtcgaaacgtgtgcgagagtacctcgtcaggtggaagggctatgatggccctgaatggttgccggtgactcagctgaattgtagggtgcgctggcgcgggcacgtttccaggctatgcaagccggagacgatcaccccaacgttcaatagccctggttccaggcagcccgaatggaaacagaccgtcgaattgtaaaactgctgaaattgcctgattttgatgtgatcggaagctgattcaggatacgagtgtggagccaagcctgtatgtgcgcgatttggagttgttcgggagatgatgatgaacttggatacgagtgagtggagtacgcgtgcaagctgcagatgtaggatgagcatggagtgataagttttggatttctccagcacgtcattcaaagagagcaagtgtacggctgcctccggaatatcatgacggctctggttgttcggtccagggctggcccgtgcgtcttctcccgaatctaccggatgttgccctgaatccgggttcgtcgcgccgccgggggctttagaggcgccactgtcgctcgccatgtcctcctcctcttcttcctcctcctcctcctcttcgtcctgatcgccgagctcctcgtcagctggatccaccacctcgcggtccaggttgccgtcagcacgctccatgtcgacgtcgctctggtcgccgcccgcgatcgcgcctggtgcagcaaccgcagcagccgaggcgcctgccggagggcgcgctggaatcgtcggcgtcgtacccgcgggcgcgagctcgctcatcgggatcgctggcattagcgtgcaagcctccagcgacgacttcaccagactcatcggagccgacaacatcgacgtctggaaggctcccgtgtgcgcagccctcgacggaaagcagctactcggcttcgtgacgaagcccgactacgatggtttcaccgaggacagcgggagcgacatgtccgacgccgacgacccgccgaagaccacgctggcaaaacgcctgagatcgactccgacgccgctggctacgacaagagtgacgacgatgacaagtgacacgatgcggctccagatttctgcccgagccccacgttgacggcctggttctagctggatccaggatccaagtggcgggaagagcctggatatgctctcagcgccctgaatcaggatgatcaaggtgtgtccaggctggaccaagattgatgaccctgaaggctgccagcctggacccccccccccagccaagatcgagccagtcatgccacaagagccgaagacgtgcccgaccaagctcgtcgatgcctaagctgcctgaccaaagcccgtgtatcctgaatcgacaacgtgtatcccgaatggacgactctccaagctccaagatttgaccatagaaaccaagacttaacgaccgaccaagccgaccgtccaagatctgctcggcacatggaaccttgaactccctcccagctgtgctgccgatccccgctggatctttgcgactcaaccgacgacaacctatactgaaaccaagataaaacttccaagactgcatgttacgattagtgatagcctacaaagataagaccaaacagagttcgtttttcctgctacatcgcaagtgtcttcggttgggagccaggctattcagagctggttcagactcaaaggagccttgtgtctttggttctccccttgcagtcagggcacctcggctaagaacgtaagggtcgtgtgtggagctctcatagtaagtatcaaaccaagttaaggcgagtacctgagctgtcgtgcggccagggttgataagctttatttcatattctagttggggtgtttgtcctggacagcactgccatttcatattaagctactcctagggcggttgaggtagtcaccacctagtgatttgtcgataggctactgagtgataggaaggactgtgttttgtattgattcggctttttccctcttgattgagggtggtgcgcgattgattgagggtcttggacttgccagtgtcctggatctaccatctttgttgactggtgcgtagggcccaccgtccaagggccaaccaaagaataagtgacggttgtgtgtattgtatatttgtgtatgactctgtattgttaaggttatctctccggatccaggctatgaaagctgcgttctgaagtgtgcgttggctccgcttcctggtcctagcgatattatcctgtttcccgcaacccacgcagtgcaagtctcacgttcgaagacaaacgacacccaaagggattccacaaaaaacacacgccacccatgacaacaccaagtgctcgtccagggttgtttcgaggggacaagtctagatccttttcgggccactgtacacctgagcggcaaaaggcgttcgcccacctcgcctcacaagcccaatcaggctctgacgaagactcaagcgcaggaggtggtggtgtgttgctgccacgactcagagaagattgcaacgatgacgacggacatccgcagctcgttcgagccgagcctgcttgatgttctgtgtggggaatcaacaaggcggagctgaccaacgacttacggttgggcaagattgacgtgatcctcgcgacggtgaagatcaacacggttcccaacgttgcggcggagttcaagacgccgtccggatgaacctgcaggagagcgatgtacgtgagcgagtgatacagtttttcaggtcaggcaggcaggtgatagaagaacacggctggtctgagttctttttagaccaagaaggttgaagttgaagtgcaagttgttcgtagcttccatcgagccgcaggcgctgcgtgaagaggtagaggcgattctagcgttacaaaatcgcgctgcgcgctctgatgaaaaggtgcttttcaaaatcatattggagaaggccctcgagcatgagagggattttcagagacgaaagcgacagcgagagtcgacccgtgctggaggaaaaggtgaaaatgcgcgagagtctgaccgaccgaagaaaaagttgagtgtgaaggaagctcacgttgcgaagaccggaccgcccccaatgctgcgaccggaggaaaacctagtaagccgtctcaaccagagaaacaacggctggtgtcgggtaagccggatggtggatgcctgaaatgcaagggcgaccactggcttgtgagatgcccagttgcaacacacgaggagaagacgaacctgctccgacagcagcacgagcgccgcaattgtgagaaggacgaacggaagaagaccgtgcaagcgtgaaggctgaagcccatcaaggagttcttacctggacctgtgaagcgggcgagctaaacggagtgcactcaatgccctattgcgttgattcgggggctgatattagcgtcatcagtaagacaaagctcgctgaactgatggcgaaggattcagtagtacgaccggttgaacttaatgaggaggtggacgtgaagactgcaggtggacattttctccgcgctaaagattacgttgaagtgaggttgcagaataatacagcggcatatcctgtttgcctcacgacgccggtgaagtgtttgattattgacgaagaagaaaatgagttcatcaatggcaaggatgtattagctacactaggaattgacgtggatcttcagatcgagcagctcgagcagcttgtgatccatgggttcattgatgacgaagaccctattgactgcgacgatgatgtcgagattggtgtggagtgtgataccgatgtgagagcagcagtagaggagttattggataaggcgatcgagaatggttttccgcgtgagcgacgcggtgaactactgacgattgcgctgatgtacgacatttggaggctgcggcttgggggttacccacctgccaaggtgccgccgcttcttattaagctgagggacggtgctaaaccccagaagtgcaaagcgcggcagtatccaccgcagttgagagagtttttgcgggatttgccgagctggagcgcatgggttgggtcttcgaaaccccgcagagtcgatgggccagccctgcattgcctgtacgcaagccgggctcagacgaatatcgccagacatgtaacggggttacacgcacaagtggctacactcacttgttactctaacagatacgatgtctgttagaggtttgaacacttcctcgaccttggtgtaaggtacaccaatggctacatacatttacgaccaccacgacgggtggtccatacacatttaggattcctattggctgaaagcagcatcttttagccaatgagtgacttgcatgttagcagaatgctgcgaaccagccgttggcagattcctagtttagaatattacatttagaggaagtcagaaacataaaacaaaaatagcagttctcatcttttaccaaaacccgctacttggagtctttatcttgtttaaagtatactcgtggatctcgagtatacttaactcaagtaaaagaaacctacggttcctcatacacgtgcgcatacgtgtaagccgtagtagtaagccaaggtaggcccattacaagacaagtgactatcgcgccgtgagcgcggagactgagaccgcggctggtgtaatgccgatcctacgcgtcgtcactgagcatgtgcgtggcatgccgtatttcggactgtttgatttcctgaaggggttctggcagcttccattggcaaaggagtgccaagaattcctgtcctacatgacggatagcaaagtgtacacacccactcgcgtgccccaaggatgcagcgacgcagctatacatttccaacgtacaatggagacgtcatttaaggagctgttgtacaagcatttgctagtgtgggtagatgatctcctactctacgccaacaatattgacgagtgagtaccttgagaagctgcaaagacttttgtgcttgatgaatgaattcggcttgaagctcagtgtgaagaagtcaagtttgtatcacaagagtgtcaagtggtgcggaaaaattatcgatggtaatcgagtaacgaatgaccccgagcgcattaaatatttgcgcgagatgtcgtagcggcggaccttcagcagttcttttgtgcggcgaattggctacgcgagagtatagtgggctatgcaggggcagtgaagccattacaggagtgtctagataatgcactgcggaacaagagaaagtcgaagagagccgcagcggctgttccaattgcttttacctcagagttgcaggaaaatttcggccgcgtgcgcgatctgctggcaacgtcagccaccctgcaccatctcagccccgatggagacgtggtattagtgaatcggtgtctgtgccggtatcgtcgcatcgttcagcttgttgtacgcatgaacgatgcgccagccgccctgtggcttcttgacacagaacgtcggagcactgtgcggggatttcgattcccgcacttgtccagttttgcgacgactctcaaagaagtcgtcgatcgccttgacctgctctcgcggcagtggccactgccgcgtgacacagtacttcgtccccggcacgagatcaatctcgtgctggatgcgttatcctgcggaagctccgcaggaatctcttccgggagtacgtccgcgtactcccgtaagatctcgtagtaggggctcgtcttcaatgagtcccagctctgctcttcaaagcgcttcttcttagtcttcgcacagagagtgtcctcgctctcagtggtgttctccgtgaagaactgcctcagttcttcattctcgctcttcgttctctcggtgtccgagagaatgcatatttgctcgatgcgtccatcgtgcaagtcacgcgcgaagcgcttccagctcatgactggaagcgaagtcaactccgacgcttgcgtcggagggttagcgagagtcatctccctgtaccggaacccggcacaggtacgcgtcaagacgttcaacgtctccacgtccggcttctcagcctccgtctgcccggcagacattccttgtagcgtctcggccccaggccgagacttgcgtagcgaccttcgcatgcgccgtcttcttgttttgtggagcccggctccgcttggttcttgaccccgtccaggcccagccgtggacgggtgttcttcttcagtaccgccggcgggttcctcccgcgggcgagcgacttcaagcccggcttggtcgcccggcgcttcatcgtgcagcccggctgcacgacagcatgcaagtttttccggtgcggaacgtttgcaaccgtccgcaccgcttgcagcgtcgactcccggagtcgacacgccatccttacctcgacgcctgttattggcggagccctccattacggagggtgcgtcggcttcccgagccgacgaatcaaattcacccaagccatcgacttccggagtcgacggcgttatgtcaccttggcccttattattggccagacctgatccaatcagattcgcgtcagcctccacggctgaggcgtgtgactcgcttgcgccatccgtgccccttgaggccggagactcttcctgattcgctgaaaagcgggtgtcgatctccgaggtcaacacatgtccttcattagttgtcggcagcaacgccgactcttgcgcgcccagagcgctccgggacagcggcgttaggcgctgtttcgagtggggagtcgcgcgcatctgtcggtgtgtgcgtagcggtaacagggccatcgctcactgttcctctgtcgcgaccgaagcgcacgagagtgcgcttctcccaatcgatgaccggatcataccgtgcaagccacggcatgcccaataagatgtcaaactttccagtacagtacgtaagctgttcagcattttccgcctttattaggagtatgtgtagagaccgtccatgactacgtggcagtgacttaaaattcgctgatcgccattcagtcgtttgatcgcggcacagcttcaacaagatcctttcgacggaggatcccgtggaaaccctggtcctggtggctctggttgcctgatagtcttgctccctcagggagaaccgactcctaccgttgaatggatggcgagcatttctttagcatcgcgacgaactacaaacaatatagcagagtaccaggcactgtgtgcaggactgaactacgcactcaccaacggactgaccaatcttcacgtggtgggcgatagcgcgatgatattggcgcagatgaggagacggcgtccgcccagagcgccacatttacggagcatttacgcgcaatccagagggatagcagatcgggtccatgtgtgcacgtggaaccatcatttgagagccttcatagtcgttaggaagaactaagtgacaacaatgtacctcaattcaaaaacaacaacaacaacaaaaccgatgagggcgttgaggagcgtttgacgtgggctgtttaccgctgctgctgtcgctgtttcaatgtatgcgtgtaacgtgtactttactgcttcagctgtctgtgtgaattttatttggcggcacgttctggttgaagtactagctgcaattgttgaccccacatgagagccttctgctcgagctcgcaacgtactgtacagcagcagcaacaacaacgcgattctgcatgtatatgtacactgttctgtatggtgcagcgacacgtgaagggtagaaccagggctgtggaaaatacgattgtgattgtaatattatcaagattgccaatcacaataattgattgttccgtgatctcaatcgacaatcccgttcccatattgtcccttactgattttgagcctttgctagtgatccggtagagcaatatgcaactccaagcccattgaaccgatcctagactcatcaaagcctttctgtgtcttctgctacttcgaaatgcgaaaatgaggggtcattgggtgcccgaacggggtacacgctcaacatgatgaatacaagacccaacattgctttttgccaaggcttttgaaggttaacacgtatgcaatcgaataagcacagatcttagggcgatagcgccgccaaacgagtaaaaatatgaacctagcagaggaaatacaagcgaaaacttagattgcaatcttttgtttttgggcctgtcaagactgcaataattgattgtttcagatctgagtcgccaatcaataaacaatctatatttccacagccctgggcagggttgtgaaaatccccatatttttgcaaggaagggtgggtttttcgattctgtcgggtgggtcgggggggggggttggataaatacaacctaacccttcaactgcagtcatgcaatggagtaggttaatatcagttgatattagttgaaataggttatggtgccacatttaagatcggtcttgctctgcgccttggcagcggggttcacgctggacgtggggtagttgacctgcttggcggagccctgcgcggcggccggggactcgtgcagcgcctcctggatctgcttctcggaggccacaccgtagaggtcgcaccaggccttctcgccctgggagaccggtggcacgctcgtcttggcggagccgcccgaggtggcgggcgtcagctgtagtacgcgcgcggacgtggacgagctgatgcagcgggcagcggccttgggtagtcggcgcgagttgcgggccagcatggctgtagttgctgttgtagtttctatgggcggcgggtagcggcttgcggggtggagagtgaattcggatgtgagccaaactcgagtgcgccgcgcctccaatgcaagtgatgagcgggttagagacgcaaataaatgtctaaacaatcgatttaagtcctataacaattgtagaacatcatttcatcttcggcttttctcaaatgttagcgtttttacacgcatttggcgttaaattgagtataaaaactaactagggctacgcataggctgggatagcaaatttacgggggcagccagaactttcaccacagcagtagtattacgacgactatcaaggcgtgcgagcgcaacctcaaagcttaactactcgtcgcctctcttgcctagcaagtgagaggaagaactatcagcttcatgggcgacctttatgagaaacctggagcattgaatatcttgtatcatagttaacgttgcgatttgttttctttgcattatttgtaccctgaaaattatctgtagaccatgactaccagcgtcaagatgcgcgccgtatacccccccccccccccctcccagctgcaatatcgccgcacgtagcggtcgtggggccattaacgtagtcgtaagctttgaaatttaaggatttctaaaaaaatagtctgctcaatgtcaaagttcgatataattgagggctatactacagacatagagtaagtgtctcctgcggtcacacattcggtcttgtagctactgcatttgtacttcgtagttaaaactcgtgttgtcctcataccgctcgaaacttactagacagtatctacttttcagatcgcactaccagccagatgctgcggctgcgaagcaggcgcaggagacgccaatgggtaatgataaaaaacctgctataaactaaaaacaaaacaactacagatacggtcaaaagacccctatcctagccattgcggggccctagtgcggtggctaggtacgtaggccggctgcttggtttagtggtagaatgtgaaattgcacaatagctcccatggcgcctatcagcgagaccgaggtagacacggactgcgacgtcagctacaacagtcagccgaaaccacatctcgaattcagcgtcgtagtgaacctgatagtggcgaattatggcggaaaacgcgcgatcatgttagtgtagggaacttgtggcaatactgagcaatagttcgcgagataaaggaaaagcagggggataggtacgtacgtaggtgccggttgctttagaatgcgaatggctgaagtcaagtgactcgagatcggactcagttaccagctccagttaccgagtcaccaggagaaagacagccagtgacaaaggaccacgataccggcttcagtttactggcttcagttaccgaggcgcgaattaacccgatttgggctgcctagcagcatgacctatgggccactgctatcccagtataaatagcgcttagtcaatgggtggatgggttttatgaatatccctaaaaagcccgaccccggatgacttggggtgggtggaataaattgtttattcccaattcgaaaaaccccatctcgcaaccctggccctggggtagaactctccacagaactctccattgtgctgggcgacgttggctacacgtacaacaaatgagacaacccagaaccaaatgatactaatgcgccatttagagttatcgagataatcgcgtttaaagttaggccatcgattttcgtaattatatgaagtttcgagaaaacggccgatttgtgttttgaaaatcaaactgtcactaaactgagcttgctcactcaagaacctgagaccacaagaagataccagtgtcctgctacgatgtcctcccacgaaccctcgcccacgcggtccgcaagaactcttgcgaccgtggcttcggccacattcgccgccatgtgggccgcgctaactgctggacgatggaccacatcatttccgcggtcaacgaggcggccacttcgagcattgcagtgcacatctcgcgtgggaacgagttcttcaagagctacaagccgctcgtgacggaactttacaaaaagctagttggggtacagcagtaccagatctttagtatggaggcgactaaacccggtgtagtgcagtgcaagaaggggctagacgacgtgccggttgagcaggatctacggcgcaaagttgacagggtcctgacagagagcactaaggtggagcggatgctcacccacttcctggaggacctgagccctccgtcgctaaatgcggagaagatgaccgagctctacagcaaggtccgcccgtacgtccctgataagtttcaggatgatcctatctacgctgccccaagccaaaaccagcaggacgacgctaaatcagcaaaacaagctcgcagagagcatcgggcagcaatggcaaaggccgcgaaggagaacagcgaccaccgaggaagaaacgaaggcaacacgagtgcagcgacgaaaaagagaaagacaaacagcgagtaagctgctgcagtctaaggggatcaaaatgatacttccatccatttctcaaacgaattgttacttatctacatatccgcgtcactagctcggggtaataactttacgacgcgatttgagcacgttctgctcggaaatggtcgaatccgatagtaccattcgaaccgccggcccattttacctttggttcaccaaaacaaattccatttttgctctgggaagggagataatttttctgagggcctataacttcgtcggtttcaactcctgggaggtgtgggtgggctcaaatgaaagaggagacgcccttctttccattggtgtgcctaaatcgcgattcgtacttaggttcattagaggatgttagcaaattggtattttacgagttggggacaaagacactcgaccaccgctgtctatgtccccgaactcgtaagaggggagtcgtgttagtacggaatctcccgagaaactcgtaaggcattttcacgagattacaagccttctgattggctcgttactctcatcccgcatctccccttcgagcaccatggccgccatggcgcttacaggtacctgtagcgccgcgactcgaatcgagtcgcggtggttcgagtcactcgaaccacctcatccagtctcaagtgccccccccccctaatcagtgtgacgtccttgcctctcccagcgaggcacacgaggatgacgacgattcggctacgcgtcttaagtcataacggcgcgtcgaagtagagtaggcagccattgaccacaaagagcagcataaagtagaatatgttgcttagagtagtgatgtcggagttcctgatcgtactattggtttggatatgtcaacctaagaagatgcacagtgcctcgatactgtagcgtttgattctatcgcgggtgatgacgtcgagatatttagtgctgcgctgagcgcgcgaatctcatcctcggtgaagcggaagtacctctttcagtacgcatcgctgtgttcgttgagccttgaacgcctgggatgatcagtcactcggggcgctcagagcgcgaagtagcatgtcatcggatgcagggatctcgtgtcagcagggcggcctctatcgctgggagtcagttggatttcgtaaatgggcggatacgagaatggtaacactgtcgacgatttcgttttaactaaacacataaaagtgttgaccgtaaatttgagtcgttatttacgaagttgctaacatcctctattaatattcttttgtttgtcgttttctcaaatatccagctgtatgtactgtagttgcagcgggttgtacattaacgatcacagtgtatcgacgctgtcgctgatcagtcgccacgtgatggtcacgcccacctgaaagtgtactcggacctcctggaatgaagaataggtaggcaccatgcatccttctgtccaagccggtcgaggacacgcccatcttagccaagttttggctaggtacgtagcaacattatcagcagtcacgcattagatgatagaaagcttgacagacactcaatttaaagccatcttgaaggatacaacacgagacactatattgctgttgctcttaataaacgtgtcgggcacggatacgaaacatcgatcctgatgccactctatgatatatcaccaagctgcgctgccttctgcgctgctgcggctcggcttagttggtgctgttgttgcggatgtagtacggctcgtcctggaactcggtctcgcagtacgggaacagcgtgtcgtcgtccgagggcgtgaagagctccttgccggcgtggatcatgacgtagcagcccgtgacggcgcacaccacgatcaccagcatcgacgcgcccttgtccacaaacgacatgctcttccagaacacgcgcaggtagatgatcagcggcatgagcaggcagctcgtcgtgtgggcggtggcacccgtgaagtcctccaggtccaggaagcgcttgcgcgccagcacagcgatgatcaccagaaccacaatgatgcagatgcgcagagcgatgtagcgcagcgggttgttcttgtacggcgcgtggagctgctcctccgtgatctcctcgccgaactcgagcgccacgcgcaggtgcgacatacggccctccgtcttctccacgaggctggaagctgacacctggcggttggccgcgtccatgggcgtggaactctggatgtacgagcgcttctcctggatctccaggtccatgtccacgttcgcctggtccacctcgccgttgaagcgaacgatctcggggcccttgtgcatgcccaggatcaggcgctcggccatgaagaacggaggcatcatgagcgtcgagaaggcgatcgaaatgtgcacctgcatgaacaggtacgacatcaccacggcgccgcggtcggcggtgaagcccagaggcgccaggccgagcgggtccgacgtgctcacgatcgagtacagaatgttgcccgacagctggcagccgccggcagtgtaaccagccagggcgacggccacgaagaaggccgagatgaacaggatggtgatcacgaccacgcgcggcatgcgctgcggctgcgagtgctcgcgctgcaggtcgggcaccacgatggcagcgccgtacgccagcgcgaggttaccgaagcacgtcagcacctggtgtagcgtcacgtcgggcgacgggatcgagccgtggtcgcgcatgttccactgcagcaccgacacggcaatgatgtcggcgatgaccgtgcccatgcagccggcgaaggccatgccggcactctccttgagcgtcgggatgaggcacacggggacgaccatgagcgccatgaagatgatccagaagatctggctgaacgagtccgggaacagcacatcgagcagcgtgctgccgagcaccaggaaggcgcagggcaccagcagacacacgcccatctgagacaccaccgtgaagaagcggccccacttgcccagggcccactcgcccaggtcaccgtacgtcttgacggacgacggcgccaccagcatcaccttggacaacttgagcgtggcgtacgtgttggcgaagatcatgaaggccagcgcgatggacgcgaacagggggccggcgcgcgcgtagttggaaggcatggccagcgaaccgatgccgcacacgcagcaaaagagattgaaggacgccttggcgtcctccatcgtgaagaaggcggtcttgccgttgctggacggcatggtgcgggacggaggaaaacaaacgtcgagcggcgcgaggcgaaagttgcttctcttgctgctgctgctgctggacctctccgagagagcgcaaattccaaagtgagcaagttaaagcaacgctcgagcgagcgacgcaaccaacttcctcctctgcttctcttcgggtccgccgccgatttgctcctcgtgtgtcctgctcagtgagcaaggcggccgggcagagccgatgcgaccgacggctcttttttcggagcgagcatagtgggcgcaagtgcggcgtgcagagcagcgtgcaagctcgcctgtgtcgggggccccacttggctcagccaaagttggctgcatcaggggcgctttgtgagctcatgtccctgcttgcaacaagttgccgttgcagcagagacttgcatccaggcgagatacggaccaccacatgaaggcaaggcgcgggcgcggcgctgaagatccccctccgtttaaggatgcgcctcggacgaccgtctcagttgggagatgcgctttcgccaatctcagcgactgtcacagtcgagcacatgtggacgaatcagcgtgtcctctcgctgtcggcgataaggtatcgcgggtcaacgatgcggcatcccactgtttgaaacgcaaaccgcatccataccttatagctgacaatcaagtctgaggagaactcgcgattggaggcgggcgctactgccgacgcatatcctgaagataacctacgccggaccttatttcgagggacaacctcgcgctgcctaggcccactctccagggcctttccggtgcagggggccgctctctacccttgtgtgctcggcgagcactgctcgctgcttgcaagtagaactgtcgacgtccgggcttctggacgtcgactggacgtcagcaacaccttagtgaagggtcgttattgacgtcccttgacaccctaccaaattaagccatataattggccaaaaaggttatttgaacgccaatcagaagcacgccatgtcttagctcgtcaatgccacattcacgaagcaagctgcgccacatcaagtgttcgggatggacaagatctcaaatgccggagcgccgtccatttcctgcgtgagtgagcttcagatcaacgaccagtggtctgttgtcggcctcatcctccaattcgccgcccagatcgaagtccacactcacgggcctgtgagcatggaagctcattccgatatgcgaggccacgtctagccggtggctagccccctccaagaagctgcgcaacacgtcgtcttcaagaagccgtccagcgtcgtcttcaagaagccgtccagcgtcgtcttcaagaagccgcccagcgtcgtcaccaaagccacctcggaaaaaggcaagaaaatcaactccaacaaaaacctcttcgcggagaccagcacgaaagcgcccaactccatccaagacaactacaccaaggcgagctctttcaaggacaagtaccccgtcgggaccaacgcgtgcaaggctgactgcgccatccgaaacccgcatgcaaaatgcagcccggttaaaccattcagctttcagcccaagctcacacgaacaatttcatcaggtcccgaccgccaacggcgtcacgagttgcccggctggaagggcatttgaggcccctaagcagcgggacaaggcgtactgtcagttcgtcgtatgtgtggtagacgacaagtacaaagatattccaaggcaaaacctcacccgcgaccacgccaaaagcttttattgctttggctgcaaggaagagctttccatcaagaagggaaagagtttggttggcccccacatgcggaaatcccacatcgaggccttacgggctttcaaagaaaatgagcggcgtgaagcagccctgaaagaatcgaaccaactggtgaacttgtttgaacgagaagatgaatcggaacagagcttcttcgagggcattttgtcggaatgggtgggtacggatttgcgacctacaagtatcatcggcgacagaggattcgcgaaggcgataaggtttgcaagcagcgcaaccactgttcttgagatcccgtcgagacaaacggtcgcgctccgtgtccacgagaatgcttcagagcgccgtttgtcactgcgagtgatgctggtgagcgacaacgaatgtgacttctattcggcctcgtcggatatttggacttcgataaagtgtgaaagctttataagcttaacggttcactaccttgacagcctgttcaacatgaagtcgtggacacttgaagttacctctattcctgagaaacacgattgaagccattgcagatgtactgttacgttgctttgcgtggtggcgtctggaccccaagaagtgtgttcgatttctacgagatgctgcgtcgaacatgaaacgtggatgcaccctccttgggctcaatcatcgatcatgcgcagtgcactcacttcacctcgttgtagccgcggcgcttctgcagaaaggagatgaacgaaagaaggcgatagcagttactgatggtgccagcaccggtgtttgtcctggcgaagttggcagtactctcggcaacgacgtctgtgtgcgcagtgagcagtatgtggaaacggaaacccagtggatagatgagcagctggatgccttggaaaatggcccggactcggacgacgacggtgaagacgaagagtttattagtgaagctgatattgatgcgctttgcggggaagttgccagttttgttgcagaagccgagaaatcggcggctatggaaattagctcggctgatatggagctggttcgcaaaacggttcgaaggttccgaaagctggcggacaacttccatcgctcacaaaaggctcgcaatcgactagatgagctgcagtctactcgaaaagagcccctaaaagtgttgatcgattgcccgacgagatggaacagcacaatggttatactccagagcgttttggatttgcagcctgcggtgaaagattttttcctgtacattaagtcggaagaaggcgagaaggagtttaacgatcgatctacaaaaacgttgaagcttccaagtgccaagcagtggttcatgattcagtgcctggtcgagctgttggccccgttcagcgttgccaccactatgctcgatggagaaacctatcctacgctgatatctcttcatattttcatctcttcactcaaacgatggacaaccaacaaatatttgatgttctctatacaagtgtcgagaaggaggcatacgcaatggaagtgctatccatcatgcaatccgtccgccgaagcttttcagccttgttgaagcagcggcttgataagggggcagaccccgaccttttgtggatatcgttgcttgacccctacatgacgaattcggcgattttcactgcggatgaatatgagaaggcgcgggagcagtttgccgatgagatgttcgtgttaaagaagaagtctgctttggttcacaacgacgcagctcgttctcaaagccctgaaaagcgaatgactgatgctacagaccgcgctcgacagagcttcctaaagatgttgtacggatcgagaacgtcaagatcatcagctgcgacggacgacaagttaaagactgactgcgagtgggagctaagcagctacttgaagcagtcgagcgaggcggaggtcaaagatcccgacaagcccccatcggctttgtcgtggtggaagcagaaccattcaaaatttccgactattgctgttctcgcaagtggcttggatgcatcgctacatcggtgccctcagagcgcgcgttttccactgcaggtaacacagttacaaaacgacgttgttcgctgaaggctagcacagttcgggatatggtgtttatggctcaaaatggagcagcatgatatgtatctagttagtgatgacaacactgtactaacatgtataatgtttgtatgcgccttcataacgaaacttcttcacgtatgtaactcatttcaatggtgcttctgcgatagtattgaatgaagatggtagagcgcttctgcaattttgggccactccgtcggatccagagacacacaagccgtgcacaagtccggcatcgattgaactaacctgatgaaaactaaacagcgccaccatctagatgatgaccacctcagagactttgtggtctgagtcaatatccccgcagccttttgcgtgtgaatacgaaatgacatgctgatccaacacgggcagtacgactccgaccaagaacatgtcgacgtacacacaccacctccagcgccatccaccgcgacatgccaacgccggccgtcatctcgtcgtcttctcgcttagctgtgagattggtctctaggctggaggcgagctggacgttatcgacttcaagtctcgatgcagtacttaagtctcaagcgagtggagatacgtgagcacgtacgccgcgttccgagcgatcgtcaacttgctgagctcaaagcctgtggtgttttcacacacactcagcaacgcgcgtaagtttccaccctccataatctccgagacggcgcacaagtccgtcagtgagtcccaagccatgcccgcgaacgggacactgcgcgcgtgctcgagcgtcgccatgagcttcacgtcggccaggagtgcgtccacgtgctcgacgctcttgcgcactttcagcagcagcatctagaccgaaacgagccgatggttgaacaggcgtctctggagtcgtcgatggacttggcttccggctccatgagggagaatgggacctgtgaagccgttctcttcctcccgctcagtgtcgcgagacgggttagtctggccgactgtcggtcattgccgcacgtcgtacgggcctactcagaggaggggtcagctgagttgacgatcaacttggccacgttggcggctaggtatggcgtgtctgtcaccacgaagttgtagccttcctgcaagtcgcgggaatacaacctagaggtgatgagagttcgcatcaggccacaagacaagcggcacagcacaagaccaagggagttctgttatctgagactacctgtgtattatcggcgcgtaggcctaagggtagagaatccgatcccttagaaggtggcaatctagcgttcctgagcttgtagtcaactacggtagtcgagctaacatgccacaaaatagaatgcgagccgccatatgcaatgaagcagcccccacaagtggcatctcactatttcgaaatagtgaccaagcggggggggcgttgatcagacgtccgttggcgacttttgacgtctgggtgttaaccttcgataacaccggacgtcgacagctctccatccttgcgaggatcattgatcgctgatgccagcagctgcccgagcgctccggatttctctagctgtaacacgattcttgggcgttgcccacaccgggacgctcgccctgtaaatgcagggcgcagaccggcagaattgtggacccggccactaccgatatgtgtgtgccagacagaccacagcgtcgtcgctggacaaatcctgcgccgctaaacggcaaaatagcacgttgaagacggcgtggccttatcttcaagctaagctaaaatgcatgtgtagctgctggcttcgccgtccgaaggcaacgtgtgccggcgcggcggatgggcttgccgcctcgcatgttattaactgaaggtggaaggatgcgcggcactgaagcgggcggccggccatccgtcaaccgagacggagcgctgtgctcctcgcccatccctccgtgcaacaactcgctcacttgggttccggtgcatatgtaaggcacacactgtgagcatgaccccatcctccttgggcggccctagacttgggcccgcctctaggagcatccccgtatccggttcgcgcgtgtctagctgttgtatttgtaggcaaggtgtaaggcgctctcgccccgatcggggcccgagtcgggcggcgctccctcttctcgagtcgatcatgaacagcagttcgtgtgctcggaactttcccttccatgacaagcagcgcgtcaacaggcgcgcgcagcggctccgcgcgggcgtccaggctggactccagcaaccagcctgcattacatgtacacgtgatgtgagttaaaggctgagcggctcgcctatgtcggtcatagagtctatgccccgacacgcggcaagaaagcaggcaaagctggtgccctaaagtacaaggagctgcagcaccggagatccatgacaagcgatgtgcgagcgaggcaacgactgcccggtgctgcagctcctttagcttttggtgcttcgctggcagcaaatcgctgcgccttttgaattgtgcagccctggtcggagtttgaaaagttattttttttgttgagacgggtggcattgccgcccgcttcaggctgctgcatcgcgattcggaacccgctccttggctggcagcgcgaggatttgtcagcaacatggcagcatttcgagtcgaaaaggcggagcagaagatctatcagcaacatggcaacatttcgactggatcaattgacgtaccacgctaaacggcgtgtttttctgcaaaaaatacacggccatccaaacaataggattaggtacccttgttttggtgcttcgaaagccccgcgtgcgagacgactcaccagggagctaagctggaggcgctgaagaccatccagtcgtcacggagttacgtgtggtgtggcgactggtgttgagtggcctggtgccgtgacaaagtaaacacgaagcatactgtggagtaacgaaatccgcttacatctattaatagagtacagtacactgttctacgccattcacgtcggcacggagacgcagggccagcactacggagccaatgcgtagagcgcggggcttgtatttatccatacatcatgcaaggtgtcgccgccaaaactcttcaaatggggtcgttacggtgacctcatttaccgacaacggcggttacgaggaggacacctgtcccacgaaaccgaaacggctgcaactgttgggagactccgaacacctccaaaatcaaggttcagaaattcggtaatctcggccggaaattcggcatcaagtcagcgcccaccgtggccgattaggcaacaccgaagacatgccgatccaggtctatagttagtaatgaatgtaagtaaagattctatttaccagaaacaaggaaacccatcctgaatttgcgctgtggagtattgataactcgctacacctagctagatctaagccgactctatctttttagtctttacccggatttccgttaagttacgtattttgtctaactgggcccctcttctatggcatgttgtccggaaacttgttataagtgcaaacgactagcagatcgaattcagatacgtacttcgcatcttatcaactcaagctcccatatgtatgggccattcacgatgttgtagatgtactcgcaatcaatagaattgtattccgggggcgatacatttacaagggctatacatgtattggtcgaatcgcagactggtggacaagctcagcgtaacttaagcaacaccacatcaggaaggccggatagagacgcccgtcagcgagccgtaatacaaagcgaaccgaaatgaacagatgccttgcccttagcggttgtttggccttaaggcccgttctcaaccggccgcatgcggccgcaccgcatcgcacagttttgtacaatgcggccgcatgcggccgcatcggttgagaacgcccgtgcggtcgcattgtgcgccctacccgcacatcggctaattcgaactcaaaacataccacaagcagcaacgcgaagtatgatgagttttgccgaagactcgtatttctcgatgctagctcatacaccaactgaaaacaatatatgaacaagtacttgtaggcctgtagtggattaatgctaaataggtatccgacgtaccagtagattaaaaccaaacagcaagaatgcaaggcaactcacaaaaactataatgaaaacggaaactcgttaaaaatatctaaatcggccatcgattttgaagctacacgcgctctacgctaaaggaatctattttgctttgtgcagcaaaagattacgcacttatatttcttcattattctggtggggttaacttacaagtagcttctgtagcataagttgacgatccactcattgagtagctccaccatatcgctgtaggtggacggtttttcttcacactgctggttgaccagcgtagtagatctttttgtatcgctttccttattgttgtctgcgccaggtttttgctgaagatgtttgcaatatgcagaaacacaacaagtttttcgacatactcacattttattttagtgctaaacctctgttgactcaaataaaaagctctactgatgccacctaaccgtgcctttcgcctcagcacgccttcgccgatatcgtgcgggcatggatgtatacgttagctcgcttgaaagcccaaacatcatggttgcccatatccgccaagttggctgtggatatgggctgtttgtcatcataaatcaagtaaagttagcaaggtctcgaatgcataacaacaatcatctccataggcactgcagccgaattgtttggcccatatatatggtatgcacgtgctggtaactgtcggcagcagtcgcagctattaatttttatctcacggtacacgataacatttaactctcacgcacacgactccgtcaaccgatgcatgttatgactacatgtatattggctgatacataacttccactcgtagggcatgatacgctagtgcatgttgatcaacgcctgctaaagagcaggtagacgtagtacacgcttcccggtggtggggtttctacatctaaaggtagtttccactacctggaacatgtatctacttcgaaatagatgtaacattacacgtcctgtacgatgcactcaataataacgcgaaatcgtgtacatgtaggccggatagagtagcgggccccctttgtgttggcgtccgctagcaaccagcggcccgaacacctcgagtagaagctaaaatacaaggttgacttctttggcagtcaggagtcaaattgacgccttgtcggctgttgtctgatagggtactgtacagcaggtgagtcaataagagcgctctgattggtgctgcggcgtgcaacccctacacactctcgtgcggcgacttcgccgcatgcggccaactcgctgcatgagcgcctatttttgcatgcggccgcatgcgaccacctaccccactaaccaatcacaagtccttttttcggctcatgcggcgaggaattccggttgagaacgggcctaagtcttgtctagctgcgtgctattaggaggcaaaatgaggactgaattgaatgaaacaggcaaactacagcttcgtgctctgttctgccctctgatctaaagcgatttagcgaaactaacgcagcaacggacgcacccacgtgcacccatgcgatcgaggacggacggtctttgctgaatccctgactttgagcgccagcaaccgctggaatctccgttacaataaagttgtcacacctagagcctaggcgataatcttggggtcgaggcgccaacacgcagcttttccatactggagcagagtacgtaatgacacgcgcatgttttcggagatacaactgaaagcgaatatcttagtctacacaaaatgtggcagtcgctagcagagctagatcttgttgaacttgccggtcagccgatttgactggattatcaggattctttatcaagcaatttattaatattttatcctcagaaaaaagagacctctcacttctgtgcattccactttctcgccctgtgtgcagtatttgataatctgaattccgtatatcgatacgccgattacggagtggaacatgaagtaccgtacgacgaatccgtaagcaatactggggcgtactccagcaattggcactcccaacaagggcattgccaccccagttttcgtcgacaacatcatatctgcttctcgaccgtttgtacaccagcctcctgtatcacagttgcagccgtttcggtttcgtgggacaggtgtcctcctcgtaaccgccgttgtcggtaaatgaggtcaccgtaacgaccccatttgaagagttttggcggcgacaccttgcatgatgtatggatagatacaagccccgcgctctacgcattggctccgtagtgctggccctgcgtctccgtgccgacgtgaatggcgtagaacagtgtactgtactctattaatagatgtaagcggatttcgttactccacagtatgcttcgtgtttactttgtcacggcaccaggccactcaacaccagtcgccacaccacacgtaactccgtgacgactggatggtcttcagcgcctccagcttagctccctggtgagtcgtctcgcacgcggggctttcgaagcaccaaaacaagggtacctaatcctattgtttggatggccgtgtattttttgcagaaaaacacgccgtttagcgtggtacgtcaattgatccagtcgaaatgttgccatgttgctgatagatcttctgctccgccttttcgactcgaaatgctgccatgttgctgacaaatcctcgcgctgccagccaaggagcgggttccgaatcgcgatgcagcagcctgaagcgggcggcaatgccacccgtctcaacaaaaaaaataacttttcaaactccgaccagggctgcacaattcaaaaggcgcagcgatttgctgccagcgaagcaccaaaagctaaaggagctgcagcaccgggcagtcgttgcctcgctcgcacatcgcttgtcatggatctccggtgctgcagctccttgtactttagggcaccagctttgcctgctttcttgccgcgtgtcggggcatagactctatgaccgacataggcgagccgctcagcctttaactcacatcacgtgtacatgtaatgcaggctggttgctggagtccagcctggacgcccgcgctgagccgctgcgcgcgcctgttgacgcgctgcttgtcatggaagggaaagttccgagcacacgaactgctgttcatgatcgactcgagaagagggagcgccgcccgactcgggccccgatcggggcgagagcgccttacaccttgcctacaaatacaacagctagacacgcgcgaaccggatacggggatgctcctagaggcgggcccaagtctagggccgcccaaggaggatggggtcatgctcacagtgtgtgccttacatatgcaccggaacccaagtgagcgagttgttgcacggagggatgggcgaggagcacagcgctccgtctcggttgacggatggccggccgcccgcttcagtgccgcgcatccttccaccttcagttaataacatgcgaggcggcaagcccatccgccgcgccggcacacgttgccttcggacggcgaagccagcagctacacatgcattttagcttagcttgaagataaggccacgccgtcttcaacgtgctattttgccgtttagcggcgcaggatttgtccagcgacgacgctgtggtctgtctggcacacacatatcggtagtggccgggtccacaattctgccggtctgcgccctgcatttacagggcgagcgtcccggtgtgggcaacgcccaagaatcgtgttacagctagagaaatccggagcgctcgggcagctgctggcatcagcgatcaatgatccttgcaagcagcgagcagtgctcgccgagcacacaagggaagagagcggccccctgcaccggaaaggccctggagagtgggccaaggccgcgcgaggttgtccctcgaaataaggtccggcgtaggttatcttcaggatatgcgtcggcagtagcgcccgcctccaatcgcgagttctcctcagacttgattgtcagctataaggtatggatgcggtttgcgtttcaaacagtgggatgccgcatcgttgacccgcgataccttatcgccgacagcgagaggacacgctgattcgtccacatgtgctcgactgtgacagtcgctgagattggcgaaagcgcatctcccaactgagacggtcgtccgaggcgcatccttaaacggagggggatcttcagcgccgcgcccgcgccttgccttcatgtggtggtccgtatctcgcctggatgcaagtctctgctgcaacggcaacttgttgcaagcagggacatgagctcacaaagcgcccctgatgcagccaactttggctgagccaagtggggcccccgacacaggcgagcttgcacgctgctctgcacgccgcacttgcgcccactatgctcgctccgaaaaaagagccgtcggtcgcatcggctctgcccggccgccttgctcactgagcaggacacacgaggagcaaatcggcggcggacccgaagagaagcagaggaggaagttggttgcgtcgctcgctcgagcgttgctttaacttgctcactttggaatttgcgctctctcggagaggtccagcagcagcagcagcaagagaagcaactttcgcctcgcgccgctcgacgtttgttttcctccgtcccgcaccatgccgtccagcaacggcaagaccgccttcttcacgatggaggacgccaaggcgtccttcaatctcttttgctgcgtgtgcggcatcggttcgctggccatgccttccaactacgcgcgcgccggccccctgttcgcgtccatcgcgctggccttcatgatcttcgccaacacgtacgccacgctcaagttgtccaaggtgatgctggtggcgccgtcgtccgtcaagacgtacggtgacctgggcgagtgggccctgggcaagtggggccgcttcttcacggtggtgtcccagatgggcgtgtgtctgctggtgccctgcgccttcctggtgctcggcagcacgctgctcgatgtgctgttcccggactcgttcagccagatcttctggatcatcttcatggcgctcatggtcgtccccgtgtgcctcatcccgacgctcaaggagagtgccggcatggccttcgccggctgcatgggcacggtcatcgccgacatcattgccgtgtcggtgctgcagtggaacatgcgcgaccacggctcgatcccgtcgcccgacgtgacgctacaccaggtgctgacgtgcttcggtaacctcgcgctggcgtacggcgctgccatcgtggtgcccgacctgcagcgcgagcactcgcagccgcagcgcatgccgcgcgtggtcgtgatcaccatcctgttcatctcggccttcttcgtggccgtcgccctggctggttacactgccggcggctgccagctgtcgggcaacattctgtactcgatcgtgagcacgtcggacccgctcggcctggcgcctctgggcttcaccgccgaccgcggcgccgtggtgatgtcgtacctgttcatgcaggtgcacatttcgatcgccttctcgacgctcatgatgcctccgttcttcatggccgagcgcctgatcctgggcatgcacaagggccccgagatcgttcgcttcaacggcgaggtggaccaggcgaacgtggacatggacctggagatccaggagaagcgctcgtacatccagagttccacgcccatggacgcggccaaccgccaggtgtcagcttccagcctcgtggagaagacggagggccgtatgtcgcacctgcgcgtggcgctcgagttcggcgaggagatcacggaggagcagctccacgcgccgtacaagaacaacccgctgcgctacatcgctctgcgcatctgcatcattgtggttctggtgatcatcgctgtgctggcgcgcaagcgcttcctggacctggaggacttcacgggtgccaccgcccacacgacgagctgcctgctcatgccgctgatcatctacctgcgcgtgttctggaagagcatgtcgtttgtggacaagggcgcgtcgatgctggtgatcgtggtgtgcgccgtcacgggctgctacgtcatgatccacgccggcaaggagctcttcacgccctcggacgacgacacgctgttcccgtactgcgagaccgagttccaggacgagccgtactacatccgcaacaacagcaccaactaagccgagccgcagcagcgcagaaggcagcgcagcttggtgatatatcatagagtggcatcaggatcgatgtttcgtatccgtgcccgacacgtttattaagagcaacagcaatatagtgtctcgtgttgtatccttcaagatggctttaaattgagtgtctgtcaagctttctatcatctaatgcgtgactgctgataatgttgctacgtacctagccaaaacttggctaagatgggcgtgtcctcgaccggcttggacagaaggatgcatggtgcctacctattcttcattccaggaggtccgagtacactttcaggtgggcgtgaccatcacgtggcgactgatcagcgacagcgtcgatacactgtgatcgtgggtttcggccctatggcccttagagcatctccagcggttggtctcaaacacggttttatcctaaaagtatcgctgttaagacttggccgagacttaaggcttccaccagaaggtcctattgcacgttttaacttcaccgggacctatagattggctttcgagtcgtaaaataagaccacaatcttaatgccacccatacaaaactgaagagtcaccgtatttaaaagattgcaccaagactgaaagcaattttcacatgcgggaatggacttataagactcgctttagaactcaccactggaagtaagtcggtctgcgcgggtctcaactgtaaaattgtggtatcaaagaccctgttacgtcttaggataagacccaccgctggagatgctcttaggccctggtctaggtagaaattcggaaagtcattctgaaaaatagcgttccctcattggctaaaaatggtcccttgctcggaacgagtttcggtggttctcagaattcctcgcagatgtattctgaagtgagaacgagtttgctgtctctgcctgtgtttattccgcaagcatttacattttccctgttcattcgcaagtgcgaacgccgcgcgcaacgaactgtcgctaccgcagcatccagcgcgtaccccaccatggaagtcaagaccaaggttgcagttctgtgcgtgatgcagtgtatttgcgcaacgctcgccgctctttgcagtgatcgtcgtcgacttggtggcgcaaaacgagaacacgtcaacaccttcgctgccacagcgtttgaccgtgccatgcagaccaagaaaactaagtggttccataagaagatgcgtgcgacaagcgtacgttcctcgctgtggtggcgcgcgtccggcaggaatggattgggatcagtcaccacaatgcaaagttcgacatcacaaagcgcgttgccgtaacgctgatctatctctctaccggtggcaccatcgacagcgctgcgtcgctgatgggaatgtctaagtcaagtgccgtgatgtacatcaaccaagtattggcggttctctcacgcatggcgaagcagcacatattcataccgacaacgcagacagaagtcgactgtgtgcgagagggatttgagaatatatcaggtttccctgacgttatcggtgctgttgacgggtcgttgattcggatctgccgccccgctgagcacgaaggatggtattgcagaaaaaaatttccggccgtcaacatgcaagccgttgtcgatcacaagacccgttttcgttcgtactgtatccgatctggttctatcaacgaccgggctcgagacggctagttgtagaatgaggtcggcaaaagccaagctttcttcggcgcttcttcgatgttttacgctaggtatagtaccgcacaaattctcagaactcgtgctgaccaggttctaagttgggaaccaacctcggaactcgtctactttgactacaaactcgggaaaagttagggagcaatgaactcgggagcattggggcagaaaaactacagcatgtggtgttagcaactcaccatacgaacaacttcaacgcaatgttcagcaatgcagcgtgtattgtgtatatattaaaatctaatcatctaattcacgcagcccagcatgcccccatgagcgtgggcgcaggaactcttgttgaaactcctcgtcgtcttggtgaagtaattcctgataagacattgtcagcggagccattcccacacgagaagtgtcgagacttttctcgaccagctcgaaccgcgatggttctcgcgtgctgtcaattccgtgcccagcttggtgcggacgaggatgctcttccactcgttgacgtttctctcgtggcgcaggcccaactactcgggaggctcgagccgaggctgtccccggcagccaccagtgcttgtcgaagtgctctggcatcagcttcagcgctccagcagactctatgatagcaatcaaatcgtgcaaacaagggcgcccatggatgcgtctgtataccccgttgcaatcactgcgcgttatgccacgaacgacgatcttgtgtgcctctcgccacttcttgtttgtctcctttaatgcatgaacgctaattatcttgaccaccgcagagtagttgtggttgcggaacaagacagggatattctcaggcccagtttcgccagggctcgtacggggcccctgcgtatgctgctccgatgtacgccgcgccgtcttacgaccagcgcgcgtatcaggcgccttaccgcgacccgacgccgcgcttcgaggagctgcgctcttctccaccgggccacccaccgcttcctgcggggcagccagagccaaaaggtcatgatacctcttaagacgacccacgtaaaacgtcgggtgagtcgtcatcgacttgggcaagtctatggtgtacgccgcgccatgccggctgaggaccgtgaagggtcctataaagcggtgcttcagcttgttgctctcgaccgagctaacagtgtttagcggtaggtttctagtatctaggagaactaaatccccaaccttaagcacgttcatgtttcctcttccatttcggtcagagtactccttctgtttatcttgggcttgcgccatggtgtctcgcaccctgctgattatgttcagcctgtcttcggcaaacgaggacagttgcttccgcaaggcggctggactcacgtccgagacttgggaggaaaaggttttccgagcctctcccccacttaggaccgaagccccggtactgcctcgtaatgtgagcggcacctgagagtgacgcaacccgttcaggtaaaagggcgtaaagcccgtcgatgcatgtacctcattgttgagtgcgaactccaccatgggcaagcgatcagcccaagagcggggcatctccgcgcagatactgcggagcgtgtcctcgagcacgcgattgacgcgctccgtctggccatccgtctgcgggtggtccgccgtcgacatcgacagccgtgtgccgagaaggcgaaactgcgtctgccagaacgtagcggtgaaccgcgggtctcgatcagagacaatggtctcgggcagaccgtggtgtcggaagacacagtccatgaacaggcgagcgacctcgtcgccagtgacggtgtcacgaactggagcaaagtgtaccatcttgctcagacggcacacgatggcaacaacaccagtgttgccacggtcatcggccggaagtccgaagacaaagtcgagactcatcgacttccagcagtccgctgggaccggcaggctctgcaatggtgccgaggcgtgaccggcaggcttcacgcgctggcacgtctcgcacgtacggacgtaggtggcgacccacttgtacatgtgacgccaccaaaacatctgcgagacagacgcgtacgtcttctcacggccgagatggccactggatggagcgtcgtgcgcctccatcaggatgtcgtacttgagatcctcgtcgttgggcacgacaatacggggaggatcctcgggctcgaccctatagtggagcaaaccgtcagcccactcatagcggtgcattgtcggggcgtgagccactcggccttggcttccgagccagcggccaagaaccgcacaagaggtccgagactggcatcgtctcggtaccccagcctgatgcgatcatacagatccgtcgtgacccgactaatatgagcaagctcgtagtcgggtcagcgcgacagcgcgtcggcaagcacgttcaacttgcccggcttgtactcgacacggaagttgtattccgcaaagaatgacagccaacgcgccatccgctgtgagaggtgcggcgtgttgacggcagtccgcaaggacgcgtggtctgtataaacgacaaagggcgtcgagcccaggaggtgcacttggaacttgacaagagcgtacttcatggcaagtagctccttgtcgtggaatggatagttccgttcggctgccttgagctgcctggactggaacgagatgacccgttcgtggccttcatcgtcggcctgcaatagcgcacagccaattgcgtagtcagacgcatcacagacgacgctgaaaggcttcgtctcgtccggcaatgccaggcctggcgcgcgctgtaagctcgctttgatgtcgtcaaaagtatcttgatggcgacgctcccagcgccagtcgacatccttcttcaggagatccgacaagggccgtgccagctcggcgtagcctgcactatacttgtgcaagtagttggcgaggcccaaccactgtcgtaggtccttctgcgaccgaggtggcggccaagccgcgatggttttcaccttctccgggtccgcccggaccccggcgctgctgacgatgcagcccagaaccttgatctcctcagctgcgaacacgcacttgtcgatgttggcgtacagcttgttcgcccgcatgacttcgaacacacgtcgaaggtgctggagatgcacctccatggccgtctggcctgcctcggcacggctgtggacgaagatgtcatcaaagtacgtctgtgtgaacgcacgcaaaggtcggaacagttgtgtgaccaagcgattgaacgttgccggggcgttagaaagaccctgaggcatgaccagccactcccagagcataccgctcggcgtgctcacagccgtgagtgggatgtcgctctcgcgcatcaggatctggtagtatccgtcctccaggtccagcgcgctatacagcgtgcagccggccatgttgttgagcaacacgtccttgcgcggaatcggtgtctgcgcaggcactgtcgcgctgttcagcttgttataagcatgaaccagacgccacttttcgttcggtttgcgaacacagaaggtaggcgtcgagtgcggggacttcgactcccgcaccatgcctgccttcgccttggcggcaaagaaggcatcaatgacttcacactgctcccggggaagaggccattgcctcgtgacacagtacttcgtgcccggcacgagatcgatctcgtgcctgattcccctgtccggagggagattggacggtggatctttggacgccacgtcctcgaactccttcaccaaggggtacaccgggtcccgggggttcttaagaatctcagagcccatgcgcgacgcgcgctgtctctggaactcctccaggacttcctggtccatgaccgaggacgagttcaactcggccgacgtggactccggtcggaggagaaacaactctgcgatctccccggcctttagctcggccaagaagtcctccatggcgagctcctcaaggttcagcaactctgaaacctcgggcagagctgtaagctcgacagctcctgtcttgacccgacgaccggtcacgccgtcgaagatgtgataacactcttcggcggctggagccttggctggaggctcggagtcgctggcgactggcgtcgtcggccacacgactaggcccggcttacgacgtgaccctcgggtgtcttcgtctcgtggcgccgccttgacggcaccaccgatcttctcgatctcgtgcggaactacgttacccgccttgtccttgagcggaacttggttacccgccttgttcttgagcggaacttggttacccgccttgctgggtgggactatgttacccacaccaggagcgcttccagcgactcccgcatcagttatggtctgagtgacctcctgtggaactatgttacccacatcggaagcgcctgcagtgccttcctcatcagttacggtctgagtgacctcgcgtggaacttggttacccacgccaacgcaagcggcgccttctccagcagcccttgctgcctgcggtacttcgttacccgcgtgtggacctacgttacccacctggtaggtgctgtccggcacctccactctcaggccttgtccggcccggtcggagtcgtcgtcagtctcgacggaccccaataactcattagacgctgctgcaccctggcggccctcgcgggcgcccctgctgctgccagaggtgggaacatgactcaccaaagctctgtcagagcgtgggggacggctggccccgatggccttgccgcgccagtcgatccaaggctcgtgtttctccagccacggcatgccaaggatcaagtcgtacttgtccatgtctaggaccaagaacggctccgtgctgtcgaagtcctcgaacttgacagtgaggtccatgtggacccgaggtacttctaccaccgtaacgtcggccagtcttaccgagaccagcccgttgcctttgctgcccgtagcgcatcggcgtacttgtcgcgattgagtgcgacagtctggcggtgcgcaaagttcttggacgccccagagtcgatcaaaaatttcaagggattatcgtatcccggtacactcgcgtgcaccacaagcagcccaccgctgcccttctccgcttcgagagtacaaagactctcaggggctaagtccccatggcgtgcgccacccgcacgcccctcatgaagacttagtgtttccccagtagggcgccccgcccctactggtgtccggcgttcccctggttcctggggcgcggcttctgccagcggcccctagagccaaagggcttcgaagagaacttcttcttcagtcctcccgccggacaggcacgtttcatgtgcccaagcttgccacagccgttgcagcgaatgtcgctatgctcggccatgcccagatccatgggaaccggcccgttgatcgctccattggcggagttaccattaggcgcaccgccagaggcagggttgctctgccataccgtggcgggggtacgagcctgcttgtggctgtactcctcctggagggcgatctgaatcgcctcctccatagtgtttgcttgcacacggaacagttgcgtgcgggcaggaccgacacgcagaccgtccatgaacacggtcaccttgatgtgttcaggcagggggttccccaccaaagaggcagtgagcactcgcatctcctggatgcactcatgcagctcgcgccttccttgtttgcaggcgaggaagcgcgaacgctggcggtactcgtagttcgccggaagaaacgcggcccgcagctgctcgcacagctgggaccatgatgcgaagcatccaggcgtcgtcgcttcgcgcgtatacgcccaactcttagcgcgaccactaaggttggagagcgcaacggcgacacggagtcgctcgtccgagacgagagccgcgtccatcgcgagctcaacctctcgaacccagaagtgaaggttttctccttccttcccttcgaaggggtgaaccttcagccgcaggggcttcggttgcaccggcttcggcgcagccgcagtggcctgcagcccttgaacgtgggcgatgagccctcgctcgtaggtgtcgaacgcgttgatacgctcaacctgctcagccggcgtcgccgccgctaagctacgcagggcatctgtcccaaagatgcctgtcatcttccgaacggactcgtactgcgagacgctcagatgaggaaactctcgatgagaccacaaaggattcaggtagtccaatctacccgcgtaggcgtaggattgactacaactgctaccaagtgtgacggggcacacagcacttcttaacagaggaagcaggagtatacaaactccaagtgaacagccgttcacgtgtccctggtctgaaggggacgacttgacttgaaaagcggtagatctaagactgaatgtatttataggttggtacagatttggcctgcatacaaatcctaagttccctatagtttgtgccatacaaaatgtatctgttggctctgaggccacttggtcactatccaggggagtgaccgatgtagccatccctgaagagtaccagggtcactattccatgtaaccccgttacatacttggtggtaccgtacccttctcccatcgtgaggtagtccaggtgaagcacttcgtttctctttgtggcggtctcggtctccgaccatggtcgctggatcagcttgccgcccttgatgtgcttacataagaggcactggttaacgaagtgagagacaactgctgtcaaattcgaaatggagaaatgtttctcgagctgggtggtcatgacatcaatgccacggtgcgcctgaattctacaatgagccaccacgagaatgcgaagcagcagattcttcgcctgcttggggatccacaacttcccgttcacgtagaccagtccgtcacgatcatcagcatttcttggtctcgaacgctggtagcgagactgcgccgcctggacagcgtccactgaaggccacgcaaaggcctcatcctgcaagggcctcagcacgctcagttctcgctgtccacgggtccggactgctttcaccttcaccaccgtctcaatatcctctcggacgggccatcgcgagaccatatcggcccattggttgtcttcgccgttgacatgggcaatagtgtagcgactcccagcgagcttcatggcccagcgctggagtttcccacgcacgtgcatcttcatgtcggtacttgggcagaaaatttgtattaggttcgcatgatcagtgtaaatgcggaagcccagcagcctctgcagcaagtagtccagctcggacacagcatacaccacttgatacacttctttttccaccaccgaccactgcaactgcgaacccttaaatgagccaccattgcacaccagcaatttatggctctgctcatgtaccgggattccctccttccagtccttgacttgggttaaaatcacagcccagccacggtccgaggcatccgtgcttaggcaaaccacggcctcgtcaacagggcttaggcaaaccacggcctcgtcatcagggaacagcttcgctgaacttaccaggcgcttcaagaagccttgatacgctgcagcctcttcttcatcccacgagatagttacacttacagcatggcgcttgcgatggctgtggcccttcatggcttcatcaaacttggtttgtagaggagccactgctctgccataatctaccacagaatcccgaagccagttagctgcgcacaagaagtgctgcagctcagcagcattctccggcaaaggaagcgaaaccagcgcctccactcgagcaggatcatgcgtcactcctcgtccatcgataatttttccgcaccatgagactgcttcctggtagacagtgctcttcttcaagttcagcttcaggttgagctctcgcagcctcgcaaagaactccctcaaaaccttcaggtactcttcatgagaagcagcatacaagacgacatcatcgacgtacacaagcaaatggtcgttgattagatccgcaaacgcagtctgcatagtcgactggaaatgcatggctgagtcgacggcaccttgagagactgaccacaccctcgtccgtctggaaactaaacggctcacggctgtcctcgtggatcggaagctgccaaaagcccttaaacatgtcaaacttgcccaacgccttcgctcccttaacacactgagggactacagccagattcggcacacttgcagcgatcggaacggtcatgctgttgaggcgacggtaatcacaggtgatacggaattcttcttcatcagccttcgggactgggacaacagcgcttgatgggagctcatcgttgtcctcgccgtacacaccactaccgttaatggccaattgctccatttggcgatcaacatcaatgccgagggcaatcggagtcggatttccgagcaggaactcctcctcgtcatcattgacgacagcacagcggacattagccacgctgactggcccggccgctgttcccagcatggagcatctttacgagccgcgttcttggtctgctcaccacgacccgtcggtttcctctccggctttgtctcttgcgacagaagatggtagcgttgttgcactttggctcgtgcaaggatcaactggtgcagcgcgatgtcctccgtcgtggcctcccgatgctgaagcgacaccaaacgcttgatctccgctttcagcacggctggagccaaattctcgataatgagcttgcaccggttcttcatccgatcacggtagtcagaccggtccttactccctgcagccagcatagatgcaaatccacgttcttcgatgagctggtcaaagtcgacaaagtacttgacgactctagcctccacatcttgctcatccaggtccatcttcaggtgcgccttgaagaagtcgaacctgtcgggtatgtggccgttcatcactttgctgacccgctcttggatcttgtcaaggatctcctggtctccgatcgagtcccgcggctggcggaagacgtagtgcgcgcggtagttgagcaacttcggcgacaacgacgagcgtacacttcggaggactgcgtccacgggttcttgcgagatgcggcaccgctcaccgatctctctcagtagcggcgtcgcttgcgaagccactcaaccagcgactcctggtccaacgtcttgagctcaggggccttgataacttcgaacacggggggcggggccgtcatctcgacgtccccatcggcgtcaacgcaacaactcagcatccgtgggtcttgccttcttccacgtgcggggcggtcttccgtcggcctttcgtcagctgactaactcttggcctgtgccaaagttaactttgtggcaaccaacttgttgatgagaaaggaaattcaattctgacagcttagacacatgcaaagctcggtagtcctcgactccctgctactcacagggagaccttctagtcctgcgctccacgctccctctgctgccttcttgagatgcatttaagaacccctgagattcagcaacacccacgcaaggttaagctgaacatgaacagcatcttggcgaggttcctgagattcttggctggattcattttgactcggactgattcgaacaggatctccccacaacgaactacaaacaatatagcagagtaccgggcactgtgtgcaggactgaactacgcactcaccaacggactgaccgatctccacgtggtgggcgatagcgcgatgaatatggcgcagatgaggagacggcgtccgcccagagcgccacatttacggagcatttgcgcgcaatgcagagggatagcagatcgggtccatgtgtgcacgtggaaccatcatttgagagccttcaacgaggccgctgacatgttggcaaatatcgccatggacgatcgcaagagtcgtcaggtgtttcgctcggaccaaccaacccgggtcccccgctgggcagaagtcactcgcctttaagacggtgacctcaggcaatggcgggatgcatatttcactagaggggctgaagagcctgacgtagacgccgagtaaggaagacgcgacaaaggcgatacgcaaagtaggagccccaacctgctgatgacgggttagcatctgcgggaccggtcgttgtagtcgttaggaagaactgagtgacaacaatatacctcaattcaaaaacaaaaacaaaaaagaccccgatgagggcgttgaggagcgttcgacgtgggctgtttaccgctgctgctgtcgctgtttcaatgtatgtgtgtaacatgtactttactgcttcagctgtctgtgtgaattttattaggcggcacgttctggttgaagtactagctgcaattgttgaccccacgtgagagccttctgctcgtgctcgcaacgtactgtacagcagcaacaacaacgcgattctacatgtatatgtacactgttctgtatggtgcagcgacacgtgaagggaagaattctccacagaactctccattgtgctgggcgacgttggctacacgtacaacaaatatccagctgtatgtactgtagttgcagcgggctgtacattaacgatctgtagtaggtcgaggatttacagacagaacaccaacgtgggcgctggaacgcccaaagccattaacatatactatgatagtgctgcttatgttcttctgctgctctctgggtaaatccctaactgacgaggctcccccgagtcttgcctgcccggtccaggcagtccaggaagactatggagccagtgaagcgtgaatagataagggtaaggccctggtctaagtaaaactgtgctgagatttgtacaagggaatgggttaggccagcacgagtttgtagggaaaagttagggagcaatgaactcgggagcattggagcaggaaaactacagcacgtggtgttagtgcctgcgtaaaatacgcccagaatatctttagagaatgcttgaaatagatcccgataagtgtacgagggcggtctatccgcgcattgaggatgacgacgccgagcacttctccttcgaccatatctcttcgccgagccatggttcgtgtcattcaaccgcacggacccagccgacggccctcgcagacattgttcttggatcacacctcgcctgctgtggcagcacacagctcatcatcgaccacatatactatacccgcgccgccccagctcgagtacgaaagtgcagaagctgccgaggcatccatccatgagtggacgaaggatcacagcttcaacgtatcccgcagtcaactcggcagaaatgcgaacggtcagattcggtaccggttgttcgcgtgcgtccacgccagaaaaccaaaaaacaattggaagattgcagatgcagaccgccagcgcctaatggctacgtcgaagcgagacgaatgcggcatgcgcatcagctcaacgacaagaagaaatactcgatttggtcgatctccaggccaaggctggtgttccgacggctaagattttttccacgctggtgctgtgcaacaaggacactttggccattccacaggatatatccaacagaaagaagaaggctcgtacgcagcttctggccacgcagaccagcaatgaggccctgttcagtttgctcgctaagaacaagtttcactacacctacgagaccgatccctcttccaaccgactgcggtacttgatgtgggcgcaccctgacaccacattgcttgcctggcgcttcatggacatcatggtgatggactgcacgtacaacacgaacatgttcctcatgccgttgttgaacgtactggaatgaataccattctgccctttgcgcaaatatggatgcctggtgaagcggagcccgactttatctgggcgctgtcgacactgaaagccttcatgatcgaacaatccgtgccaatgccaaaggtaaacggtacagaccgagacttggcgtgcaacaaggcttcggacacgatttttcctatggctgcaaacctgttatgccggtggcacattcgtcgtaacgtccttgcccaggcgaagaaaaaacttgtcgttgctgaagatgatgatgcagatgccaccgccgtgcagaagaagcatgaccttcaggttgatatttacatggctaagttcgacgatgctatcaacgccgccagcgtaagtgagtttgacaagctctgtgccgaactgcatgcacttagtccgaccgtgcagaaatacctcaccaggacatggtggccataccgagccaagtttgtgagcgcgtggaccaaccagtacagtcactttggctgccacaccacgtcccctgttgaaggagcgcatgcaaagatgaaacagtggctggacaactctcggggtgacttactcgcggttttccagaacctgttgccgtggtggatgaaagctgcatggaccacgaaatatcatctggctgctgctgctccggatacggcgcgtggccatgaagctcggcccgaaggccagcgagctggtttcgcagcgagtcgtaagacgacaggtcggctcgacgacccacgcggccatggagactgcgagtttcttgatagagcgaggcaacatcctcacggagccgctccacggcaccaggctgaccagcacgagcggcagcctcgccaccaaggccgacgccaagcgcgatctcgaggacgtacacacggtcccggagaagacgaatctcctcttgctgcagggccaccaccttactcggggccccagcatacggctgcatcgcctcaggctcgtagccatggccgtgcaaggccaccgccggccctccttgatcgtaatgggcagatccactaccacgtggaacgagtcgtccgggagcggcggctccatggcaagcgccagctgctcgtgaagtggaggggttaccctgagtcggataactcgtgggagcccgttgagcagcaccaggcagactgcccggaggctgttacgatatgggacgagaagcagcggcagcttcgtaagtagtccttggcttcttggccggtacccggggtacggtagcagacgtagtcgcaccacgcccacgctcttcacgagctttggctctcgcctcttgcttcagctcgtccatcttcgagtggagcatgcgcttgctcacgagtagagcgaactcgatgcggagctcgcgcaagtccaggatagcggacagagtgcgatcctcacggagttctttgaactcttggtcggaataccctttgcgctggacatagcgccagaagcggtcttccacctcgttccaggtcatgttctcattcggcttgacccggtggtaaccccacacaggatggagtccacccttgtcctccggcttcttgcgaagcgtggtgaactccttcagtgtgagcttgtgtggtggtagtagcacacaccgggcggcttctatgtcgccaagaaagagtggctccttctcaacgagagcacgctcataggaacccctcgagctgtacccgccgataaggccacgaggggccgagagcttctccaacagcgatggcgcaccagtgccaggctcgggcgggaagtagccctgcgggtacgtggcatccccgcctgacgaagactcgacagcaggcgcggcagccgactgcctggcgtgtacccccgagcgagcagcgtggtattgctcctgctgctcgtcgaggtcgttggagagctccttgggctcatggacggcaccctcctcgtcctcagactccgagtcgctgaacggcttggagctggaaccgcgaggcgacctggaaacggaacgcttcttcgccctggcctcttcggccttcgcagcggcagccgccttcgacgcttgggcacgctcacgaccttgtgccagcgtcagatgcttgggtggcgacaccgggctcgtagcccgcgtcgctcggcgacttctcggccatgtcctccgtgtcggccatgacgacgtcgtcttcttccgcctgcttgctgtcgccggcgccggcgctggactcgacgtcctcggcctcctcctcggacggagccttcgggaaggacggagagctgggcgcgctgctcgccgccagtgcttcgtctttggcagcgttgtcgctgccctcgggtgagctctcaccggaatgcacaaccagcgtgcagttctcgctgttggccgaccagtcgaaggccggcttggcctgctccgactggggccgagagctctcctcaccacttggcgtggcctcgggagtcttgcaccgcctccgagaccggcacccgccctccggcgtgctgccacgagagcgcaccgcctcctcggccgccttcgtggcctccatcagcgcggacgactcgtccttggccttggccgccctggtcttcggccctacgcccgcggtttcaaaggtgctttcgcgctgcgcgcactgcgctttggaggcatgcttccggtcgacgtggagaccctgcggcttgctcggcgatgcgccagctgctctgtgaggcccgggagccgaagcgccagagctcgcgccgttgtcgatggatttcgactttgcgagtgaaatgtgagtcgccggcgtaacctcgctctgattggtcgataaggtcgaatctaagtgggggaggatgtaagagcctgtacgctacgtagctggagatggagacgaaaaccaaaagtgtgaccggattggtcaaaagtaggtagcacacaacaagacaactagagatggcactgtgaattcgtctccagcactttgaggtggagaggggcggatctacctagagatttacagggccaggcacaacatgggagacgaagatgcaattgtcctcgctgcgtgctccgccgtggcacaggctgtggctttgtatgcagacagttgcgaaccaggacctcctgctggcaagaagaaccgttttaccgtcaccactctgcgcttcgagtcgatgcttcaatcatcagcctattcaagctggttcgagaccaatctgcgctgtacgagatccaccttcttccgtatagctagctttctacaagagcatggggtcgcttttgcacaagctaaggtcaagaagcattcctacgaaaagaaggtggcagccgcgctggatttcctgggctcagcgggtggatatcgcgaggtgggagctgcaatgggcatggctagaaggtacgtcatggagatcactacgaaggtagacgttagaagctcctttcagacgagacttgcctcggtcctgtgctgcttgcgatgcggccgaggcttgcagacactcgagcatgcgagatggagcgggagtaggctctggcgtagcagacatcgccactgatacttgagctagcggaacaaatgtggatgcagtctcggcgccttctagcagcagaccttcatcaccggcagatggtgtcagcgagacgaggggctcggacgctggcgtttcgtcatgacgtgcgggggggcgcaggaaccgaagagccttgagcagcggcatgtgccgcacgcgtggccgcactggtgaggcgagtcggcattttctcaagtggggaggagagccatcccatatctgccctgtgattggcttaaaatttgtctggagatggatacatagcgaacgagctgtaggtggagatcaagcaccatctccatctctagtacaacgcgaacaggctctaacggggttacatggaatagtgatcctgttacttttcagggatggctacatcggtcactcccctggatagtgaccaagtggcctcagagccaacagatacattttgtatgacacaaactatagggaacttaggatttatatgcaggccaaatctgtaccaacctataaatacattcagtcttagatctaccgcttttcaagtcaagtcgtccccttcagaccaggggcacgtgaacggctgttcacttggagtttgtatactcctgcttcctctgttaagaagtgctgtgtgccccgtcacaaagtatgtgttggttctgaaagatgagctcactcattattgtgagttagtcgcacgtgatgcacctacgagcgatgtggctgtgatcgcaattctggactggcacaagcgattcggtcttccagccaaatgggccactgacaatggtagtcatttccgcagtgcagtgatggcggaactcgcgacaagattgcgcggactgcagagctttgtacctgtgtacacgccatggatcaatggtaccgtggagagaatcaatcgggacatactacaagtcgtgcgtgctttgttgctggagctgcgttccgatacacgcagttggaagtacctgttgcccgtcgttcaagcgaatttgaaccaaacacctgtggcttcgctcgggaacaagtctccgatggagcttcttactggtctgcccccatcgacccctctcgagacttgtatggttcctgacagagccgaagatttgcttgacgtcgatctaagcaatgtggagggcttcctcaatcgactacgtgagagccttcacgctacgcacatggaagtcgctgatcgcaaagaaagacggcggctgtaccagcaagctcacaaggaggggcccccgtgcaatttcagcgttggcgattttgtcttgtagagtcgggttgatacgagactcggctatggcaagttgctagtgcgttgggtgggcccatttcaagtgacaaaagctagatcgcattcgttcatggtgcgccatctgctgacacaggcgctgcacgaagtacacggatcgcgcttgaagttctatcacgatccgagcctcgaggtgaatgaggagctggttgagcatgtggcgggccaagggctggttctaggagttgaagatatcgtcgatcatcgctacaatgactccaccggccaacatgagctactcgtgtcatgggttggcctggagtctatcgaggactcgtgggagccgctttcgatcatgcttgcggacgtcccagtgaaggtgaagctgtttgccagtcgtcatgacgatgcagagctgcggcgactgtgcgatgtcgagacgcggtagactacgagtgtcattggtcttgattggagttcgtttttggtgagcagtgtggggagatcctgttcgaatcagtccgagtcaaaatgaatccagccaagaatctcaggaacctcgccaagatgctgttcaagttcagcttaaccttgcgtgggtgttgctgaatctcaggggttcctaaatgcatctcaagaaggcagcagagggagcgtggagcgcaggactagaaggtctccctgtgagtagcagggagtcgaggactagcgagctttgcatgtgtctaagctgtcagaattgaatttcctttctcatcaacaagttggttgccacattcgtcgcgatgccaaagaaatgctcgccatccattcaacggtaggagtcggttctccttgaggaagcaagactatcaggcaaccagagccaccaggaccagggtttccacgggatcctccgtcgaagaacagaattgtaaccggcttcgataccgcaataggacgtgatgaacgtccatccctcatcggggtcgacaccgtccacattcatagcccctgggatgcgttcccatccttgcatgggaagttggcacgaggtagtgatacgttgccatggtacatgtactcgagcgccgtgtgctgtagattttgtgttgttttggaggaagaggattgctggaaaggatcttgttgaagctgtgccgcgatcaaacgactgaatggcgatcagcgaattgtgagtcactgccacgtagtcatggacggtctctatacatactcctaataaagggcgaaaatgctgaacagcttacgtactgtactcgacggtcagcagtggcaaggcggctgatcggtaaggaggctgctttctctgtcagcactataaataattcgattgggtgtggttgcccacagcaatgccgtacaagggtctacctagaaacaaaattgaatttcagatttctacgctttcacctttcttcaaacgagaagaaaacgacatccaatctcgtgaagagatgccaagacagccaaccattcgctagaggcgagtcgcagtgcgagatcactttagaactagccgacaagagagcaaaactcaagaatatagacttaatcgaaacggaagcaggcatagcagtgcagacaggcagccagcatgcaattgtcggcagtaagtacaaggggaaacccggtacagtaaaatgctgtgcaaacaaacatcaactcaagtaggactccatgaaccatgaaccacgacgactcagtttttctatagactctattgtatatattattgtagtagtctagctttcttgctcgtgatcggataaaaaaatacttcactacacagtatcaataaaatctattgcgaacaggatgactttctcgtgtgtgaggtcgcgtgtgctgtattcatcagcttaccacacaacggccccaacaaacgatagacgcttggcagcacatgcgttgcgagagctagatacaaaagtaaagcaaaatttacagaaaaccaacaaatgatttcgcattatgctactgtaacgctagtacgaaccccacctagccgtgtaagaagccctagttcgcggcgctgacgttgtagtacaccgtgtgctcgaactcaggcgcgcagtacgggaactccacctcgtcgtcggatggagcgaacagctccttgcccgtggtgtacgtcacgtagcagcccagcgagaagcaaatgaccaccacgatactgcccgccaccttctcccacatggccacgttgctccacgacttcttcaggtagaagacgataggcagcaggatgcagttgaccgtgatgcacgacgcgccgacgaagtctgccagggacgtgaagtcgtccttcagcacaatcgagatgatgaccagcaccaccacaatgacgatacgcatgacgacgtacttgatggcgttcgcgccgcggtactccagcgcctcctcctcggtgtcgtacttgtgcacgttttcggcgtcagccacagacacgtacgacatcttggagctgcgcacggagtccttcacggccagatcggctggggtggacgtctgcaggtagttggtggcgatctcgaggtcctcgtgcgtctgctgcacttccttgtgcatgcccaagaagagccgctcggcgatgtagaacgccgggttgatgatcacggcgaaggcgattgtgatgtggagctgcatgaagaggtaggcgagcacgatggtcccccagttcggagcgaaccccaagtgggtgaggccggtctccgaatcggggtagatggtgaagagcaggttgccggagatctggcagcccacagccgagtacgccgtgctggccaggatgaggaagagaatggagataatgccgacggtgacgaccacgacgcgcggcatacgcttggggtcgctgtgctggcgctggatgtcggggatcacgatgccggcaccgtaggcgagggacaagttgccaaagcagccggcgacctgcgagaaggagaggtcgggcgacggcacgctggggtggccactgagaccgtgcatgaccacggcaacgcccaggacgtcggcaacgatggtgccgaggcatccagcgaatgcggcggcagctccttccttgagagtggggaccagacacacgggcaacaccatgagcgccatgaggatgatccacgtggtctggctgaaggcttccgggaagaggccatcgagcaacgagccaccgagcaccaggaagacgcaggggatgagtaggcacgagcccatttgcgagatgacgcagagccaacgaccagtttggcccatgcaccactcgcccagatctccgaaggtcttgacggacttgggcgctagcagcatgaccttggacattgtgagggacgagtaaatgttcgcgaaggccatgaaggccatggcgaccacggccagataggggccggcacgcgagaagttgccgggcataccaagcgttccaacaccgtagatgcagcagaagaggttgaaggccgacttggcgtcctccgccgtgaagaaaggtcctttcgccattgctctggaaacccgggcgcagtatgtagtctagttgcttgattgagttgctgaaccgttcggcttgagcggaactgagccaaagtgggaatgagtaacgtgagctggcctgccggcaggcagtgccttcaatgccaccgcaaacactgttctagctaacagctgggtagccgtcgctagcctcagtagcttttagcaacttgtctaatacaggctggtttcgaaagcatccattccatctccctgtggcgggcaccgatggtgcttgtccttgtaggcagtacagtagtgatactgcactggctggtacagtacacagtatagtatacagtacagtacgtgtagaaccaaaggggaaaggatgtgatgcacctgattaaagaattaatccagcagatctatcgggcgcacaccaacatgagagcgtacagaagccgcctgcgagcgtacgcgttcacctgagagagtaccttcttgccgcaccagttgccttttctgctcgttaaatcgtgctgcagcgtggcttcaacgtcaatgtgtactggagcctacagtaagtctgtgcgctccagttccctaagctacgctgggacgaatttgtgggcattcgtggcactagcctcatggatttaccggcaaaatacgcgctgcatataagctgggctgagttcgtaacatggtgaaggtatcggagcactcgcattgcggcttttggaagttgtagctacggtatccttggtacagtgtatccggttcgaatcgagtgcgatttgtgtgagctctcttcaagagagcaggcgggcgtgcaaaaccggctcgggggcgaggcggaacgcgttgcccacgtgcgccgtcatcaccttgaagtgcaggcgattggcgtaagggtcggcgatgccagctccgtcactgcgctggagggactactgtacatgtagagctcttgtgcggggtcgacgatcaaactcgttgtaaatgcgtgcgtctccttcgtctgctcgtcgacacaactcgaagcttgtcggctcgagtgactacgacttaccacgagtgggccggcactggtctgtagcacgcagggcaggggaatttttacttgactgaccacggcttccatcgcacactgaaagttggtactgtattcgcacccaccacaggtcgtagaactggggtttcaaactgtaccaaagaccccaaactgaagtgattaaaagattagttgcaccggaaaaatagtgaaaatggcttcggttgaagtgcgacaatgtcgcgacgcaaatttactccagcctaggattcgaagtggcgtattggctactatatcccccccccccctcacggactcgaaacgtgttgtccagtgcatgcagcaccctcgcctcgatcggagggcatacaggtaggcaatccgcccctgaagcatgtgctttcgaccaccacaactcaacatgcatgcaccataactcgccatacttgctgttcctcggagtctcattggctagccatttacctttgtcggggggagttgaggtggcatatttgactccgcgatccccccccattttacaccgtgggggaatatactacacgttttctcagaccggatccagcgtgtagttgtattttcggtggaaatattacttttacgcagctttgtccccaccggtggcagtgctctaagcgcagattttaagtgcaggtttgaatttaatgctaagacttgtactagatcgaataaaatggcacaagaatttttacggcccgtgttattactataatacatgtactatacagtatagtctatacttgttcgggtacaatgacaatattttccggtgcaattaatcttttaatcacttcagtttggggtctttggtacagtttgaaaccccagttctacgacctgtggtgggtgcgaatacagtaccaactttcagtgtgcgatggaagccgtggtcagtcaagtaaaaattcccctgccctgcgtgctacagaccagtgccggcccactcgtggtaagtcgtagtcactcgagccgacaagcttcgagttgtgtcgacgagcagacgaaggagacgcacgcatttacaacgagtttgatcgtcgaccccgcacaagagctctacatgtacagtagtccctccagcgcagtgacggagctggcatcgctgacccttacgccaatcgcctgcacttcaaggtgatgacggcgcacgtgggcaacgcgttccgcctcgcccccgagccggttttgcacgcccgcctgctctcttgaagagagctcacacaaatcgcactcgattcgaaccggatacactgtaccaaggataccgtagctacaacttccaaaagccgcaatgcgagtgctccgataccttcaccatgttacgaactcagcccagcttatatgcagcgcgtattttgccggtaaatccatgagactagtgccacgaatgcccacaaattcgtcccagcgtagcttagggaactggagcgcacagacttactgtaggctccagtacacattgacgttgaagccacgctgcagcacgatttaacgagcagaaaaggcaactggtgcggcaagaaggtactctctcaggtgaacgcgtacgctcgcaggcggcttctgtacgctctcatgttggtgtgcgcccgatagatctgctggattaattctttaatcaggtgcatcacatcctttcccctttggttctacacgtactgtactgtatactatactgtgtactgtaccagccagtgcagtatcactactgtactgcctacaaggacaagcaccatcggtgcccgccacagggagatggaatggatgctttcgaaaccagcctgtattagacaagttgctaaaagctactgaggctagcgacggctacccagctgttagctagaacagtgtttgcggtggcattgaaggcactgcctgccggcaggccagctcacgttactcattcccactttggctcagttccgctcaagccgaacgtttcagcaactcaatcaagcaactagactacatactgcgcccgggtttccagagcaatggcgaaaggacctttcttcacggcggaggacgccaagtcggccttcaacctcttctgctgcatctacggtgttggaacgcttggtatgcccggcaacttctcgcgtgccggcccctatctggccgtggtcgccatggccttcatggccttcgcgaacatttactcgtccctcacaatgtccaaggtcatgctgctagcgcccaagtccgtcaagaccttcggagatctgggcgagtggtgcatgggccaaactggtcgttggctctgcgtcatctcgcaaatgggctcgtgcctactcatcccctgcgtcttcctggtgctcggtggctcgttgctcgatggcctcttcccggaagccttcagccagaccacgtggatcatcctcatggcgctcatggtgttgcccgtgtgtctggtccccactctcaaggaaggagctgccgccgcattcgctggatgcctcggcaccatcgttgccgacgtcctgggcgttgccgtggtcatgcacggtctcagtggccaccccagcgtgccgtcgcccgacctctccttctcgcaggtcgccggctgctttggcaacttgtccctcgcctacggtgccggcatcgtgatccccgacatccagcgccagcacagcgaccccaagcgtatgccgcgcgtcgtggtcgtcaccgtcggcattatctccattctcttcctcatcctggccagcacggcgtactcggctgtgggctgccagatctccggcaacctgctcttcaccatctaccccgattcggagaccggcctcacccacttggggttcgctccgaactgggggaccatcgtgctcgcctacctcttcatgcagctccacatcacaatcgccttcgccgtgatcatcaacccggcgttctacatcgccgagcggctcttcttgggcatgcacaaggaagtgcagcagacgcacgaggacctcgagatcgccaccaactacctgcagacgtccaccccagccgatctggccgtgaaggactccgtgcgcagctccaagatgtcgtacgtgtctgtggctgacgccgaaaacgtgcacaagtacgacaccgaggaggaggcgctggagtaccgcggcgcgaacgccatcaagtacgtcgtcatgcgtatcgtcattgtggtggtgctggtcatcatctcgattgtgctgaaggacgacttcacgtccctggcagacttcgtcggcgcgtcgtgcatcacggtcaactgcatcctgctgcctatcgtcttctacctgaagaagtcgtggagcaacgtggccatgtgggagaaggtggcgggcagtatcgtggtggtcatttgcttctcgctgggctgctacgtgacgtacaccacgggccaaggagctgttcgctccatccgacgacgaggtggagttcccgtactgcgcgcctgagttcgagcacacggtgtactacaacgtcagcgccgcgaactagggcttcttacacggctaggtggggttcgtactagcgttacagtagcataatgcgaaatcatttgttggttttctgtaaattttgctttacttttgtatctagctctcgcaacgcatgtgctgccaagcgtctatcgtttgttggggccgttgtgtggtaagctgatgaatacagcacacgcgacctcacacacgagaaagtcatcctgttcgcaatagattttattgatactgtgtagtgaagtatttttttatccgatcacgagcaagaaagctagactactacaataatatatacaatagagtctatagaaaaactgagatggttctcttactacatgcaacgttacagtatacactgtatacccctagtaggggtgtatactatacagtaaaccaatttgcgctaagtacttgttcgagtaccgtaatctgcccgagtaaggaacgcctgatataagtaaaaacgcagaatatatcaattgatgttaagttgagtatacttttccaatgtactgatttagttatttcaaaatgaactgaagagcagctttacctacgagtccggaatgattccaacagtggcgtatggtcgaagcactaacctttgaccaggcatcctcgcaccacaacagcgctgtcaaatgggtggagtgggggaggaggtgggcttgtggggcgaggtgcaaaagcaaaagtgcgagtctaccactacggtacatgtagtttgaagtctagtaagatcgctaaatgcgcgccatttttcaaacgagggtggagagctgatgattggcactggatttttcaccttagtacctcagtaccttgcagtaccttgcacatccccctatcgccacatcgactggaaaataatattaaatatgtgaggctattagttatacacccgttccttattcgggcagaattctgtacagtgaaatgattcctttcttgtactgtaggagtggacggcgcatcacttggaaaccgacgcatagagtgtattatacactgcgcgacataatctttcggacactcacgtttttgtccatatctcagcttctagaaagagttagagctcgctatttagatatgttgtacctatcagatcaatctatagctggcatgtgacgcggacctagatttctgagcgcgtagataggctagtatacaactgacacgattccggaccgcgacaaagttttcggacaatttttatcttgattaaagtatgtaaaagaatgattgtcgtaggttgtcgtgtgttcgtctcctattatacggtggaccaccatcgacgatgatgtcggcaaggctgcctgctgggccggcgagcgcctccagagcgcccagtggctccaggcttgatgccgagttatcggcaagctctatacgatacgcatgcgcatcataccgtggcccctggcgaagcctgggcctccgggagggacggtaggttcgaaaccatccgctcccatgatttgtatgggaatgtgcgacagacaaaatggctgtcaaggcaatggacatgtaggcctctaggagaccatggtgcggccaaagcagccactagacaacttcactagtctatctaacctcttctaacgaaaattaggctctgttttgatacatgttgccgtgaactagacgcgaatgtgtgcattagcgccgacataggacgctgattggctgatttgatgtacccatcacagcaggacatactttaatcaagataaaaattgtccgaaaactttgtcgcggtccggaatcgtgtcagttgtatactagcctatctacgcgctcagaaattaggtccgcgtcacatgccagctatagattgatctgataggtacaacatatctaaatagcgagctctaactctttctagaagctgagatatggacaaaaacgtgagtgtccgaaagattatgtcgcacagcaacgccagaatggaaatgggttggaggacggctaaaatatccacagaaatacaagataattcacagcgatcgtcttaatccacagatttgcgaggtcagtcctcaacaggtggtgacaatccacagaacctggggataatccacagctcaatgagcaaatccacagctcccagagtcaatccacaagatgcataatgtctagtccacagctatttaagccaatcattattattctctatcatgatatttgatccaatcagaatctctctctatctgcgtgaccactaaatgcgattgaagtgcaatgtgaagtcgatgatgctgttggtgttattgagcgcaaggatagcagcagaagccaagttcctcaggcagaactattaggccatgacatcacacatctaatgaactctaatttactacctaattcgctatattggtggagctgaagctcgaaacccgcaaaagtacaatgagaatacgttgaacaaacgcagtgattcgccttgttggcagtagactcgagcttcgttcgacaccgcacgtgactgtggtgtagtgagaagcagcatgctgacttatttacgccttgtttgatctactaactctaaattggcgtgtatacgctgttttttagagctaaaatgaaactcgatgctgcagttcgggcagtttccgggctgcccctctcgatggagcgcgctcttggcgtgggctgcaggtgcgtctgagcacctgtgttatggtcgatcttttgtggcatggttgacgtactaactctaaatgctgacgtgtctacgctgctgtatagaggttatgaagctggaagcagcacacatggggtgctcgccgagcacaagagcatcgacgcggagcgtcatgggggcgcttagcgacagtgaggcgtcgccgttggtccactcggagtttcgccgccactcgctgtcgtcgcgggacaagttcaagcgcaagggcgacgccaccgccagcgagaggattaaacttgcggacagcaagtgacgccgcccactacgtagtgctcatcgcggaacaacagcaagctacgataggttgctgttcttccgcgtgagcagctcccttcagggcagtctgcacgcatggttggaagtgatactagtgcacatgttgtttcactccacgcatattaggactagaatagcaaacaatacagtacaagtagctttctgttacgcattaaacttatactacgcacatactactacgtagtactacctacagtaattagtctggcccagactaattttgaagtaagactaattttgagcccagactaattactgtaggcactgtagcagtagtaggtattgccatgacccgcaacaacttgtcaatctagatatggttgtattattcgtccacgcgcattacatgaccatggctagcaaatattctaacagcattaaaggaattattgtacatgaacgcgttagcctacaagcatagcatcattataaccacacaagtatgccgctgcacgcgcacctgcggaaaatggccacgcgccaccctctacggccccagagccacccgtgtccggctagcaggatcttggagtctgcattttcatccacagtaacgtcagtattgcgagttagctcgacgccgacactgcattttgttgcatcgtacccatagatgttgcctctacccacctgctccccgcgctagacgcccgaacctgcacactcagcacctgctggatgtgcttccggtaccgtacatgtacctcaagaatggtacagccgtcgccgcagattaatggtggcagcctgttattgtccccatcggccaactggagacgcaaagctgtggattatccctcaaaaagatgtggatttttcaaatttactcgtcaaaaagcactttaccaccttggaagtcgcacttggagctgtgtcaagctttgcggtacagatcgaaatcgaactgtcaaggaaacaggtctaatcaagttgctggtgaatgattagacgagtcggtggtaattctggcacaagacaccaccaagttgaactgaggctgctacatgtacaacacgtgcatgtaaatatagcttccggcggtaagctgagtgtgcttgctgtgtacaagtccttgcgatagtggtgatgatacagtatccaattttgatactgcgcacgcagcgtgcacaatacgtgcagcacaccgcacgaaaagatggagcgtgttgaaacattgagtgtcaatcaccttctgacccaccgcttgcatttatactgaatacagtacaccagcgcacttcccaacttggaacccaagtgggcaaggtggtgcggaaggatttgcagcactgccacttcaacgtgagtggcgatgttcaacatcacgctacagcgtgcaggggctgtttcgcaagaaaggattcagagcggtagcgttattaacgctgcgttaaaaggtcgcagaccgacgtcgtggttgtcatggctaggaacgcccaatcagccaagcttggcatcggagatctccagtgacctcggtgacctcgctggaaatggtgaactcagcaatgcaccaaaattgtggcgccaacatccaaactactgattggaagtttaacgatccatcctgaagtctgaaccagcaccagcaaaggcaccaagtgcgcgcttgaagcccgcgcgtagatgagcagaatctccggatctctagtcgacatatcaaacgagattgatgcactttcgtaagacgatacttagccccagaatgcctatcataagacaaagcgtcttacgttttccgatcaacgcgttttgactacatcttggtttttgtataccagtggctacattgcatattgtctgtcaaaacataagacagtttgtcggacactagtttgcgccatacaattggccaaaagtgttcaggtcacagcggcatcgttgccgcggacgcggtggcaacgttgagcgccgaaacgatgcagttgcatggtgcggtagggtaagtagcctcttgttcacacacgaagcgatgtgcctgtagttggccgctggcagcaagcttaaatatcggcataatgactgcacgaacgcgtgcatgcagtccgtggagctgttccactcagaggtgcagccgttgtagggcacggagttacgatgaagttggcagacgtaaactaagagggacaaatagctcgtaacggtactacatgtacattttaatgtagtaaattttatgcttgagcgtacatcatagtagttgtgaaggcgtggcagccagggaacggtgttgccaatgggcttcccgagatcctccaaccccctcttacctaatcattacagtccagcaacaaaatgcaaccacgtactctgcaacggcgataatacctagatcttatacctacgacgctgaggtgcggaggagctccacactgctgcgcgggcgctcggctgcgcgccatatcgctgctgggctcgagcttcggcatcggcgagttactcggtatctcctgcaactaagtgattgaagtttgagcaagctgcatcaagtacttgtacgaataaaaacgctaacagaaccctcaaaagcaaaccctggtatgcagcgactcgcagcttgctacagtaagagctcaaccacttgattccgcagcgaatcaaccaacagcatggctgaaatgtggggtgaaacctgagtgcgttgcacgtgttatgcacgacttttttggtagttggactccaactccaactgttggagtccaactgtccaacttggacgactcgtccatcatccaaagtccgtacagtaccggatgcaacacaactttcctgtgctgagaccggccggctccaggcgccggcgagatcctttcgaatttcgagtcgaaggagctctcggccaattggtcccggctcaagtcgacttccccgccgtccaagatgccgttcttcacgatggaggacgccaagacgtccttcaacctcttctgctgcatgtacggcatcggcaccctcgggatgcctggcaatttctcgcgcgccggacctgtgctcgccgtcatcgccatggccttcatggcattcgccaacatctacgcgtctgtcaagatgtctcgcgtgatcctgctcgcccccaagtctgtcaagacgttcggggatctcggagagtggagcatgggccaaactggtcgttggctctgcgtcatctcgcaaatgggctcgtgtctactcatcccctgcgtcttcctggtgctgggcggctcgctgctcgacggactcttccctgaagccttcagcgccaccgtgtggatcatcctcatggcgctcatggtgttgcccgtgtgcctggtccccactctcaaggagggagctggcgccgcctttgccggctgcatgggcaccattatcgctgacgtgatcggcgtggccgttgtcatgcatggcatgcgcggccacccttcagtgccgtccccggacctcaaggtctcccaagttctgggttgcttcggcaacttggctctggcctacggagctggtattgtcatcccggacctgcagcgccagaacagcgacccgactcgcatgcctcgcgtcattttggttaccgtgagcttcatctcgtgcctgttcctcgtgctggccagcactgcttactcagctgtgggctgccagatttcgggcaacttgctcttcaccatttacccggacgcggacaccggaatgaccaccctgggcttcgcaccgagctggggcgctgtggtgctagcatacctgttcatgcagctccacattaccattgccttctccgtgctcatcgacccggccttctaccttgccgagcgtatggcgctgggcatgcacaagaagacagacatggaagctggcgtcggttatgccgagtccgcgacgcctgccatcctccagaccgagtctcgccgcagctccaagatgtcctatgtatccgtggcggatagtgagcgtgacttcaaggacgacccggaggctgaagcggcagagtaccgtggtggcaagaacaccctcaactacattacgctgcgtattgtcattatcgtcatcctcgtcgtgctttccattatcttccaagatcacttttcggatttcgccgatttcgtcggcgcgtcgtgcatcacggtaaactgcatcctgctaccgatcgccttctacctaatgaaggcgtggggaagtactccgtggtacgagaaggccgccggcgtaattgtgctcgtggtgtgcttcttgctgggttgctatgtcacgtatactaccggcaaggcgctgttctcgccgaccgacagtgataccgagttcccctactgcagcaccgagtacgagaaccagatctactacaactacatggcagagcacgagtcctaggccttcttaggttttctagacatctactaccttcagctgcctggaaaagagtaataaagtggcgatacatgttgagtttctacgatgttcaccgatccttgcccaacaagaaacctctacagtatcctactgaggctccaattgaagaatatcggccctgacaatcgcttcgggcagcggtatgtccagatactccactgtttggactcgactctgcttcagaagaccatggtcctccagacacttgacagaatttttcattgccagcggtgtggaatgcaatagcttcttgcgacaagcctcatagacggactggtaagccacgatttggggcttccgagatcggttcttagtcgaatcggcagcagcgagttgttggcgcgctagctcttgcagagtcgccacatcggtgggtgtgagactttgcagaataaacttgactccgctgcttgtagcgtccgccgtcttcgcgcgctttgccaaccgcagttcgatttcgtccgtgtacggctcgcaggtgtcgatattctggctgagccactcgaaccgaagagagtcctcttccttccagatcgaggggccgttgatatggtccatcgaagcaacaagcgcgatgaaaggcgatttcgccagccaactcaaacacgtctgagcctcagggttccgcaacaccagtccgtctatcgagtggacgagcagataaacttgggtcacatgacgcgagcctggcttagttttggcgatttctcggtactggggtgagaggaaacgtagcgattagttccacccacagataagttcatctagctatggttgcacctgctaaagcgttacctgttgggatagcgattggtttggcttcgcgtcaactcgaagaacctacacacccaatcagatcaacaacccgatgggctagtcaataccatgcttgcaaagggccgtaaacacaagtatgctaagagttccaccttctgttggatagcctcagccaaatactttagcgagacagtcgggagatagccatgcacttgcataacaatgccatcgttcaggtaggtagacgcgaactcctactcgcatacaacagcacattagtcttgaacacaaaattgtgtatcattcggtgagccaaagattacttacttgaagcaacgacagcttggaccccacgccgtagaagagcaggttgtagccagccaagagctcgctcttccatgttgggaagtgctgctggaagcgtctggtctgctgttccacgtgttcgtccgcagctcgcagctccgcgagcagctctccacgtgggggcagctgcagcgcgttgctctgttcctcgtcctcctcgacgtcgtcctcttctacctgctgacgttgtcggttgctccgctgcttctgagcccgactcgcgctctgcgcggcggcggcttctgcggcctgtcgctcctttagaggcggcggcttgggcttgcgagtcacgcgctggcggatccgcttggacgtgaagtaggcgttggcagaggacgcgcccagctccacgctgccgctcggctccgagcgccgctgccggaagcgcgcgcgcagcccggcatcactcatcgaagccaaaaatgtcactgttgtgaagtacacgcgccgcgctttagtgacgcaagttgaagttttttttagcgaccttgcggtattgcactcgttaggacacgagagccatggcagggacgtcgctcttccgcgtgggggacgtcgtggagctatggcgcgtactgctgcatctgagcgtgctggtggtgtgtctgctgctcttcgagcgcgccttgcaccttctggagcgccgcgccgccgtctccgccaagtatgagcagctgctgagcaaggcgtaccgcgagctcatgatcctcggactcatcggcctcggcctcaagctggtgaaggaggcgcccagtgtagacgggggcagcgctactattacagccttccaggtggccgacctgaccatcttcatcttggcgctggcgctcatcctgcagaccgtctgcatcttcctgcgcctgcggaaacacaacgttcgagctgatcgcgccgagctgctctccaccgaagatctggccgacgctgtggtctcagcaacaagcagccaagcacgcgatgtccaagagttggtgcatttgcgcctgctgcgccacttgttcctcgctcgcttcgatctgcctcagcttttcccgttttccaagtaccttcggcaggcgcaaaataaccagatcacacatatgactgacgtcggtgctccgatgtgggcactgctgctcgctgtggcctggagcctggagggtatcacagacattctgcagcacagcgagccagatctacccaggcgccgcagtctcgtaatcgttctggtggggtttgcctgggcgctgctaacggtgcatgtcgccgtcctggtttactttcgatcctgtgttcagcaactgctgaaggctgctgggatggcggcagacccaccgaccctggagagtcatcttagagttattgcgcgcgaggaagctcgagcgtggaccaaagaggacgctgggcaagcgcttttgaccatgcaaaaggtgcaagagatgtatgaagcgccccaactgcgaaaacattgtcaacgtggtgaaaacaagagcagtctggtaccggaagctgtggcccgcatagatattcgatggttctcacgaaggtcctggcactttatcgtgatgctgttgctgatgctcaatgggttctatttggcgcttgtagcccagtgtgttgcctaccagatcgggatcgtgtatgaggactcggggctagcagaggtgctggctatcccactgccgctggtgctgaacaccttgatactccaaccgccgatattccggaacttggtgctcgttagcagcattttccgcgtggatggcaccacactaaacgaagtagttaaccattttcgcgaaattgtcgagcttcgctccgagttcgcagccagtttgtggaatagcatgcaagcgaagacgctctcgattggcgacctgcagacagagttggaggcgtgcgatcctggacattctggtgccattgatatcgaaaacatgcgcttggtgctccgacgctgcggttttcacctttccagcttccgcttcaacagtcttgcaaggttactgtttgagctcaacgaaatgcaaatcgagtatgcccagttgctgaagctgattgagctggcgcaaactgaaatatgcggcactagcgcaggtgttcacccctcgatgccggtttaccatcacccactgcttcgacaaagcgttctgggggaagaagatgaaggcacgacggaaggtgtcgggaactcgtatttacccccgcaccctttactggcgtcaatgccggtggattcgtccatttcaagacgaacagtggtcgtgagtactcgctctaactcctttctgccaccgcgacctcaattggggcgaagcgacagcaagtttcaaggagtaagctctagagctctgtgtgacctcttccacatcgactgcaagctagatccgaacgtgcccacacctacagttgactgcaacttcgctcacgtctagatcgaaacattccagattacatttacgctagatgcccactgacttagatccttctaatcaagtagtagtacaaggagtacggttgtcttatgcttcgtgttcagccgtgtagttgtagtagacgtcgtcttggtattctggagcacagaacgggaagttgacgtcgctttcggtcggcgcaaacatctccttcccggacaaatacgtcacgtaacaaccgagcacaaagcaaacgaccaccgcaggcaccttctcgtaaatgggaacacagctccagcagcgcttcaagtagaacacgataggcaggatgatgcagcttattgtgatagccgaagagcccacgaagtcactcaaatcggaaaagtggtccttcagcaacacggaggcaaggacctgtaacgtgacgattgcaatgcgcagcagcacgtacttgatcgagttggcgccacggtactcagcagcctcagcctcttcgtctacatcattgtccttttcaatgtctgccatcgagaccaccgacgccatcgatctctttgagctgcgctctcccttcaaaattggtgtgccagtagggtcatagctgattgcggcctcgacatcatccctgggcaggcgctcctgcgagttgttctggtgcatccctagaacgagtcgctcggagatgtagaacgcaggggataccacaaccgcgaaggcgatggtgacgtgcagctgcatgaacaggtatgcgaggacgacggcgccccagttcgacgcgaagccaagtgacgttagacctgtgaccgggtccgggtaaatggtgaaaagcaggttgcccgaaatctggcaccccatggacgagtatccgctgctggcaagcgccaggaagagcaccgagatgaacgtcaaggtgacagctacaacacgaggcatgcgagtcgggtcgctgtgctggcgctgaagcgatgggatcacgatgccggctccgtatgcgagggacaagtttccgaatgcactggtaacttgtgagaaggagatttggggcgccagcacactcgggtggccacgcatgccatggatgacgactgcaactccgatgcaatcggcgataatggtgcccgcacagcctgcgaaagccgcgcctgctccttccttgagcgtcgggatgaggcaaaccgggagcaccattagcgccatgatcacgatccacaccttctggtcgaacgcgtttgagaagagtccgtcgagcagcgagccgcccagcacgaggaaaacgcagggcaccagcagacacacgcccatttgggaaagcaacaccaagtagcggccagtctggcccatgcaccactcgccgagatcaccgtacgtgcgcacagacctgggagccagcagcagcaccttggagatcgccacggaggcgtagacgttggcgaaggccatgaaaagcagcgctacgctggcgatcgccggccccgctcgggaaaagttgccgggcatgccgagggtgccgacgccgtagacgcagcagaagaggttgaaggcaattttggcgtcttccatcgtgaaaaaggcgccgcgagccatctttagcgagtcaccggtgtgcggagtttaggcagcgccaaagtgagaatggtctttcgcgacagcgtcgtcgcgtcctcgatcttcgcgttgcaaggagcgcctggctcatccagcgcgccccggcacatgggcaaccaaatgctttcggcaggtggcgccgccttccatgctggaaactggagttctcaatacagcgttggcgatgcaaataatgggcgccatcatctggcatcgattggcgcggcacgtggaactgccgaccgcaagttccggtgcagctcccgtccgaactgggcgagcgctatagatagtaagcgcagcgtacatgtatctgccacctccttaagttggtccgagctcgagagagcaacttcaagaggaacctgcactctgcagttcggaccaagcggatctttttgcaaggtctgcgaggccatgtccacctgcaagttgcaggcttgcagggcaagcgcatcctcggcggttcaaaccaggggaagcatctccggaggaggaaactcatctcctgataccgactcttttcggcgatcgacatagccgtgtgaaagtctcagcttgcagcggagaaggctccgcatctctggggttcctatgcatgcaagcactcagctgagactcgttcaacatggcacgaagcagcgcctgccttcagcgtccttggtctcgctggagctcgcttggggcactgctagtagccccaacgggcgtttctgaagttggagcatcccgttctggtgcattgccactgggtatgtctcgcgtccggtgtcgggtcaaacgctgccggtgtcgtgtcgagctggatgcgctcgcaggaatcatgtccggtgcggcccttcaaggtgatgctggcgggaaggcaacttcgagatccggtcgaggtttggtgcatgtgctgatgcgctcgcggctgtgtgggaatgctctctgcaaagagactaatcgccgccctctgacgggagccacgccgccgggtgtcatcggcgatagaaaagcctgggaggatgttgaagtgaggaccattttgagtcccagcgctccttaggagcccggaggcttggcgcttcgagccgcagcaaggcaagaaccgcttgcagcctagcgcaccaagcacacttattctgttgggatgtctgggtgtgctcagcgcgctcacagtacagaactttgttgtttgtgtatatgtatgtactgtacaccgtttggcgtgtcaactgaacggcggacgcccgcagcgtttttgactcgatctgataccgttcaaaaacgccatgtatcgctcaatccagcaacacggggttgaccacgatgtgcccttcgctgcgagcttttgggcggcgagcatggcggcaaccagcacctgcagctcgtttggcgccgatgcccctccatttgccccacatgcttcgcttccgcagcagcattgtcgtgcgatgcaacgaagagtgatgtacactcggagagcatcccgaagatgctttcggccgcgctgcaaacccacgacggatgcaaacccacacaagcaatagatccgttcgtacatcaagtcgccaattgcaccccatacagaactgcttgagctgttgggcgtccgcgcatactgtgcgagtttggtgccgacgtccgagctaacatgcaagttctccgtagcgctgggttgaactcgcgagttcttctcgccggattaaaatcagtcggccacgtcgtccgagacggcaagtgttgatttgctggccacagttggcggcgcagagtccggtgtcgcggtgcgagtgccggtgcacgagcgttaaatcccgcaccagaaagtgcggggccaaggatccgccggcgctcataggctcctcaggaactgacgtcgccgggaggactgatagagcccactctttagcgcacagaggggtccctgctgcaacccgttctgcgttggctacgccccccgctccgtttgtgcaaatgtatcgcctgagaacttcgccagttgaaccgctacgtgtcctaggtgagctggggcacacgaaggcattgcaccgcccacctcactcaagctcagtctgcaatttcccgccttcccctcaagccgccaactcgaaacggactcgaccatggctcgcagcgccctcttcactatggaggacgccaaggcggccttcaacctcttctgctgcgtctacggcattggaacgcttggtatgcccggcaacttctcgcgtgccggacccgtgatcgcggtcatcgccatggccttcatggccttcgccaatacgtactcctcggtcgccatttgccgtgtcatgctgctcgcgcctcgatcggtcaagacctacggtgacctcggtgaatggtgcatgggcacgaccggccgctacctgaccgtcgtctcgcagatggccaactgcctgcttgtgccttgcgtcttcctggtgctgggcggcactctgctcgacggcctcttcccgggtgccttcagcggatcgacgtggatcattctcatggcacttacggtgttgcccgtgtgcctggtgccgactctcaaggaaggagctggcgcggcctttgctggttgcatgggcaccctcgttgccgacgtcattggtgtctctgtcgtcatgtacggcatgcgcggccatccgagcgtgccttcgcccgacctcaacttcaagcaggtcgcaggcgccttcggcaacctggccctcgcgtacggtgcgggcatcgtgattccggcgctgcagcgccagcacagcgaccccactcgcatgcctcgtgtggtgggcgtgaccattgctttcatctcgtgctgcttcctggtgctggccagcacggcctactcgtctgttggctgccagatctcgggcaacctgctgtggtcgatctacccggactcggagactggcctcaccaccctgggcttctcctcggactggggtgccgttgttctcgcctacctcttcatgcagctgcacattacgatcgccttctccgtcatcgtgaacccggcgttctacatcgccgagcgcgttgtgcttggaatgcacaagtctcctgttgctgacgtcgagaacaatctgatgagctacgctgatgctgctaccccggccgatggcgccgagcactccgagaaggagtcacgcacttctaagcgctctttcatttctgtcgctgacaacgagaacgcgcactttggtgatccggaggcggaggctgctgaataccgcggcgccaatgccatcaagtacgtggttcttcgtattgtgatcgtcgttatccaggtgattgcttcagtgcttctgaaggaccacttctcggatctgtcggacttcgttggtgcctcatgcatcacggtcaactcgattattttgccgatcgtgttcttgctgaaaaagaagtggggtgtgcttccaatgtgggagaagattcctgcgctggctgtgatcgttgtgtgcttctgcctgggctgctacgtgacctacatttcgggcaagaacctgtttgctcccagcgacgacgacacgtctttcccattctgccctccagagtatgagaacactgtgtactacaactacacggctgctcacgagaactaggtagtgtaattgcatcatggtattgcacatgttaaatgtgaacgttttacagtccatatatcgggtctctacaaaatgtgacgtgtttcactgttcatgaatttctgttcatggaagcaaaactgctcataaagtcatccacggacaaagcgcggcgtttgagcaaaaaaatcgtaggagtacagtactaacccacaaccaggcaaggccttcaatttaagttcaaacatgattcgtttcgttacaatcgcccaacacttcacatacacctgcacttgtctagcctagctctcgtgctcggccgtgtagttgtagtagacggcattctcaaactccggagcacagaacgggaaggccctgtcgtcatcgctgggatcgaacaggttctggcccgacgtgtacgtcacatagcagcccaggcagaagcacaccacgaccaccgtgagcgccggggccttctcccagatgggcatgacgttccacttcttcttcacgaggaagacaatgggcaggatgatcgagttcaccgtgatgcaggatgcgcccgcgaagtcggccaagtcgtggaagtggtccttcaggatcacggacgcgatcaccaggatcgcgatcataacgacgcgaaggatcacgtacttgatggcgttggcgccgcggtattccgcagcctccgcttccgggtcgccgaggtggacgttctcgttatcagccacagaaatgaaggagcggcgctttgaagcgcgagacgtgtgcgactgcttctctgagcgctcggtaacatcggccggagtggatacgtcggcgtaattcagcaggttgttctcgacgtcagcaacgggagacttgtgcatcccgagcacaatacgctcggcaatgtagaacgccgggttcaggatgacggagaaggcgatcgtaatgtgcagctgcatgaagaggtaggcgaggacgaccataccccagtccgaggcgaagcccagggtggtcaggccggtctcggagtccgggtagatggcgtacaggagattacctgagatctggcaaccgatcgacgagtacgccgtgctggccaggatgaggaacaagaccgaaatgaaggtcatcgtgacccccaccacacgaggcatgcgcgtgggatcgctgtgctggcgctgcagcgccggaatcacgatgcccgcaccgtacgcgagggccaggttcccgaaggcgcctgcaacttgtttgaagttgaggtcgggcttcggaatgctggggtggccacgcatgccgtgcataactacggcaacgccgatgacatcggtgataatggtacccatgcagccggcgaaagcagcgccagctccttccttaagagttggtaccaggcacacgggtaggcacgtgagcgccatgaggatgatccacgtcgtcgcgctgaaagcacccgggaagaggccatccagcaaggtaccgcccagcaccaggaagacgcagggcacgagcaggcagttggccatctgcgagaccaccgacagatagcggccgggtttgcccattgcccactctccaagatcaccgtaggtcttgacggacgtgggggcgagcagcatgacacggcaaatggcgaccgcgccatagacgttggcgaaggccatgaaggccatggcgatgatcgcgatgaaggggccggcacgcgagaagttaccgggcataccaagcgttccaatgccgtagacgcagcagaagaggttgaaagccgccttcgcgtcttctgcggtgaagaagcctttgcgtgacatggtgcgagcagcgacggatgacacgggagggaggagcggtggagcgtcgcggtgacggtagtggaggaggacttgagcggaagctggcaaatccaggagtgaggaggtggagggagttgttgccttgacggtggcgactgcggatcgcagagcgacacaatgccaaccacagtagggggcacacgtgatgtcgaggaaggatcctatgtcttagtttgcgagtactgtacaaattccagcgtggagggtgtgaaatgcattgaagttgcgttcatgtagcagttgggaatcgttttgccaggttggcacttgataggatttgctacaaaagagtcggagacctgctggggtgcaagatacatgtcatttagggcgcgtcacgcacccatccacctatcaaatgcttgcgttctcacgatcacacacttctttcgtgtacatctccttgattaaacgttttaatcagtttgcacaaaaccagactagggatcttgaacagaagcgagcttcggaagatgggttcaagccgttgtaactctgctctttccagccaaagctccacatgccgcaccagagggcctcaatctaacacgtacaagtgttgggagtggttgctgtttgtcgccgtgctatcgagtgtagattgttcggttgactgtagcagtgtgtggcaaatgctacctctacaataaatactcggtccgaggtagatgggcccagcccttcaagcggtacttggaatacgttgtcaacgatatgtagattggcttcgcgtttaatctttcgcgcacatgcaaactccggagagagcgagggacgggaaagtgagattgcatgagtccttcgatgaagatcctacgactacttcgatgatcaaagtcgcaaaatccagaagattgcgaaagcagcaccatcgcccccgtggtgaccacggtgctacagtttggttgaaaaaaaggcatttggagggcatgttgcagtctaataggctaaactttcaactgacgcgcagctgaagtcctgtatcttgccgcaccggaaggcttccgactctctcaactctctcatcaaacggacaagggacagacaactctttgagttcaactccatctgacttcaatacgctcacgcaggtgtgcatgctcgttcctcgacatcacgtgtgccccctactgtggttggcattgtgtcgctctgcgatccgcagtcgccaccgtcaaggcaacaactccctccacctcctcactcctggatttgccagcttccgctcaagtcctcctccactaccgtcaccgcgacgctccaccgctcctccctcccgtgtcatccgtcgctgctcgcaccatgtcacgcaaaggcttcttcaccgcagaagacgcgaaggcggctttcaacctcttctgctgcgtctacggcattggaacgcttggtatgcccggtaacttctcgcgtgccggccccttcatcgcgatcatcgccatggccttcatggccttcgccaacgtctatggcgcggtcgccatttgccgtgtcatgctgctcgcccccacgtccgtcaagacctacggtgatcttggagagtgggcaatgggcaaacccggccgctatctgtcggtggtctcgcagatggccaactgcctgctcgtgccctgcgtcttcctggtgctgggcggtaccttgctggatggcctcttcccgggtgctttcagcgcgacgacgtggatcatcctcatggcgctcacgtgcctacccgtgtgcctggtaccannnnnnnnnnnnnnnnnnnnnnnnnnnnnnnnnnnnnnnnnnnnnnnnnnnnnnnnnnnnnnnnnnnnnnnnnnnnnnnnnnnnnnnnnnnnnnnnnnnnaatcttgaaccccgcgttctacattgccgagcgtattgtgctcgggatgcacaagtctcccgttgctgacgtcgagaacaacctgctgaattacgccgacgtatccactccggccgatgttaccgagcgctcagagaagcagtcgcacacgtctcgcgcttcaaagcgccgctccttcatttctgtggctgataacgagaacgtccacctcggcgacccggaagcggaggctgcggaataccgcggcgccaacgccatcaagtacgtgatccttcgcgtcgttatgatcgcgatcctggtgatcgcgtccgtgatcctgaaggaccacttccacgacttggccgacttcgcgggcgcatcctgcatcacggtgaactcgatcatcctgcccattgtcttcctcgtgaagaagaagtggaacgtcatgcccatctgggagaaggccccggcgctcacggtggtcgtggtgtgcttctgcctgggctgctatgtgacgtacacgtcgggccagaacctgttcgatcccagcgatgacgacagggccttcccgttctgtgctccggagtttgagaatgccgtctactacaactacacggccgagcacgagagctaggctagacaagtgcaggtgtatgtgaagtgttgggcgattgtaacgaaacgaatcatgtttgaacttaaattgaaggccttgcctggttgtgggttagtactgtactcctacgatttttttgctcaaacgccgcgctttgtccgtggatgactttatgagcagttttgcttccatgaacagaaattcatgaacagagaaacacgtcacattttgtagagacccgatatatggactgtactacgactacgcgtaggctggggtagcaattttacgggagcaaccagggcttccaagtactagtatgctctgtctggaggtgtttctggtgcatctgcagacggatgcatgaatacatttccaaagtgagatcaacgcgttgtaggggcctggtgttcgagtggtcactatggacttatctcgaagaagctttgaagtttaaaagatttctaaaccgaatctgctcaatatctctaaaaggttggcctcatgcatttagggctacatagggtatgtatcacactttcgatcttgtagctacattggtacttttccgctaatactcataccgctaatgaagaagcgcacagagtgatgtgctggcgtggtcatgaatataaaacacagacacccggtgcaaggattaggcccatatatacatggatgtccgcagtatctacccaatatagtgcaaaaaaatagataacttaaaacaccaattgagtgcacggtttcaatttattgcacgatatgcattattaaccaatggaatcgatctattcgacattgtgatgttttgattggcctaaaagccgataatcaaatttgtgcgcgacagttttagtatggaacagcttccaacaagggcctcgaaaagttttgcggtaagtattcaacaatgactctggagggtgtcagtgtgctttatcacaatcacaaagcggcgggaaagacatacatgtcttaacaggcacctgtgctatcaacaagtacatgcccatactgaaaccaagataaattatggatcgtgcactaaaatgatcactggcttttattgctccttgtgccactacacttccacctatagctttgcaaggacggtttatcttacagttaggaatatgctcctggtattgttccttattccgtaatacgccatgacccgaatagcttctactgaaccatccttgtgctgtcgtaggcaaattccgaaatgacccaaaatcgcgcactcaattggtgttttaagttatagcgtatttgaaagaggtggcaaaaaagagaaactataaccaaacgaaccttgcatgagaagtatttgcagcttcatctgcaaagcagccgcgggagatgccacgagctgctcatgggtaatggtaaacagcctcctataaaactaaaaacaaaacgacacccgcagatttggtcaaaacccttctatcgtagcctctccatgttagctcagtgtagagggtgcgagtgctctcaagagcaaaccacggcagtatccgcctgcggtgcgcgcgttcgttcgcaagtttaacagccagctggtggaactcggctgggtgtacgagaacctgagcagccgctgggccagctcagtgctgccagtgtgcaagcccggcgagaacgccgatgcctaccgccaaacctgcgactatcgagtagtcaatgacctcattgaggcgttgattagcacgatgccacacatggccacgctgctcgaacatacttgaggcaagaggcatttcgggttgtttgacctactgaaaggcttttggcaactaccgctagacgaacttagccaagagttaatgtcctacatctcctgcatttgtgataaggccatgaccttttggtagggggttgtgatacgaatctatccaattgccgtggatgacctgttgatccgtgacactttgactcgtcttgagtatggtgcgatataaacggcaactgtgatacggacaaatcacgatctcgttgtgacctttcacgactctcgttacggcacagataactacgacaacacgatattgatacggcgcagatattgccgtttgcagatattttggccaatgcatgcttattatctcgttaataatctcgattttaatccagccagctcttaattaagacctaggtctgatttatatatctcgccagtacggtctaagatccgagcttggggctctgttttctcgaccaaggcgcttttctacgacttggaaacgcagaaatgccattctagacgggccaaaccgagtttctgggcctaaaagcggcctccagcaaagtataaagctaaatcagccctcgcctatctcgtgtccactcatattaagagacatacgtggtctattttagagggcaaagtatttgcaagcgacaataactcgcaacggcacatataatcactttatgtacgggcacacactagtacggcgcagatatcccgtctgggtctctacattttcagagaactttagtggcgtcttgatggccgcggccaacctgaacgtgcatacatctagtgtccatctgcgacgatatctatgtctgcttatactggtatcgcgacagagctctgcactcccagacttctgtagtagaaaagctagcgcaacggcccggatctcctccgcgaatacatgcaccgcactgccctgcttcgcaggcataccacgcaggcatacagccgcaatacatgcggctacgcggcctcgcaaccgctcactactgcgcgcaattaatgctagtattgctttgcgcttgcaggtaatgcatcaaacgcataccagtgatgcttacctttttgacaggcaggacgaagctcgggtagccttaaggcttccgtctgacagagctgttaggcagcactgaggcttctggcgtggcgcaaggaggactacattcactacgcgtgggtgctgggagaccgcctccgctacacgtgcgtcgagcgcaaggagatgcgagacgcagctctatcaattttcgagaagaaatacatttactacgagagcctgcatggctccttatgcttcctacacacaaacgcaacagccctcctctctccccccgctctgccgcagcttctagcctcgcaaccgtgccgcaacagcacgcttcctcgcaccgacgagctacaaaatcaacggcggatagagagcgtatttaagtggatcgacacagtgcgaagttatatgcgccgtaggcttacggcgcatataacttcttttcgtcctgttgtagttatctgtgctgtaacgactgcgacctttcactaccgtctaaaagcgaaaaaccaaaagaccacgcacgacgagaacgatgatgcagacggcgtgagctccgtgaacggggcctttgtggcggtcatcaagacatcgtgggcgaggcgaggacggcgacgtgcaccaagagcggcaccgcaccaacggtgcgggtagtgacaaagtatggctgcagctgcctgccaattcctcgtgggtgtcgtcactaaggactgactgacccgacttcttcgtgctgctcttgctacagctgctcaacgtcgtggactggtacgacgagctcaagaccggcaacgacgtggccgcgctcgaggcctgcctgagacccatgacatccgcgacggcatgcacaaggccatcaacgccgcactgctcataccagacgaccccatcacgctgtcggccggctcggccgtgcccgcggactacgatctgtgagagggcaaccccgtgcagatcgaccaggccgtgctgaccggcgagtccttcccggtgaccatggccacgataacatcgccaagatgggccccacggtcgtacgcggcaaggtgaaggctgtggtatcggccaacgccggcccgaccttcttctgcaagacgttggtaagaaccttgaggaagaaggcgctggtgcggactcatacgaagctgtggaggaggtaagtaacgagcacagtgtggcgattttttttatggggtagcgctaatgtttctgcggttttattttatgtacgtgaggggcactcatggtactatatcgacagtacgacggactcgtggggtctcggcgttgtctttcggatcatgttgcactcaagcgagctcggtctcgttgtggcccgcgttgaaggctgagttgatggcactgcgtgcgtatgttagcctgtgtcatttcgcaacgatgcaaccaaacacttcgtaatgaattcgaagagagcagaaaagttgtcgtgcttattgagggttgctggtcttgggtactgtgtaccagttgtacccattaaccggttaacccgaaccggtccaatccgaacccacgttgattatggtgattacggtaagttgtttacgccaccgatgattagacgagtaggatgattggatgaacaccggtgagtgatggttgattagatgcactaggtgataggacgcagggtcgcgtgtctataacagtagggtgtaagctccaacaattcaatcactttcgaatcttcattctacccctcaagtgccttcgctccggtcccgccgtctgcgacgtccctccctccgcttcgtccgaacttcgtgtccaagatccataccttccatcaggttatgagcccaagcaccatgtcctctgcccaagacgcctcgaccaaggtctccattgacaagttcaacggggacaactacgcgacgtggaaccgctacatgcgtggcgtgttcctgaccaagtcgacgtggcatgtcgtgaaccgcgagacgacgccgagcttcacggactcgcgggccaaggacgactacgtcaagtcgagcaacatcgcgttcggactgatgttgctccacatggacgcggactaccaccatgtggtcgacgactgcgaggaagcgtgggttgcgtggacgcgcctgaagacgctgtacggtggttcgcagaaggctgaacgcatctacctgaagcgccaactcttcagcatggagatgtcggaaggcggcaacgtcttgcatcattgcaacgaggtcctcaacatcagcgccaagctcagcagcatcggcgccaagatggaggatgaggacgtggcgatctgcctgttgcgcagcctccccaagagctacgagaacgtcgtgctgaacttggagatgagcagcgctgaactacgatcgcaagacgtcgtgaaggtgctgacgaatgagcacatcaagagacaaggcgagaagacggcgacggtgaagacggagaatgcggccaaggcgttcaacaccgaccgagagtctcaccagtgtacgtactgcgggaaattggggcacacgattgacaagtgctggaccaagcagaaggacgagaatcggggcccaagacgcggcggcaatggcaatggccgtggacgcggggccaacaatgcccagtggaggaacgacgacgccagctacaactacgactacggctatgatcgagtgtcgttcgcggtctcactggagtttggcatttcgacgggcaagaatgtgtccgggttgtgggcggtcgacagcggcgcaacacaccacatctgcaacgacaaggccaagttcgctcatttgattgagcggaatgaaggcgaactttcggtggccgacggcaacaaggcggccatcatgggtgtggggaccatcgtggaacgagtggttctgcccaacggcgacgagcgcgacatcgagatcaagaacgcgctgtacgtcccaagcatgagcaagaatctgctttcggtgccacagatcaacaagagtggtctgttccaagtcgtgttcgacagcaccaagatgcagattgcgcacaagggctccaagcaagtggtggcgacggcaaacctcgtggatggactctactggctccagacgcctcagcgatcggcgaatgcggcgaccagtgggaagacggtcgacttacacgcgcgtatgggtcacgctccggtggaggtgcttcgcaagatggtcgacaacaacatgatcaaggacgcgaaggcaccttccaagtcgagtggaccaagtgtgtgtcgcggctgccagcaagggaaaatggtccagaagccgttcccaagcaaccgtgacaagcgtcactacgacacgttcgagctgctccacttcgacgtgtgcagccccatggaagaagagtcactgggtggcagcaagtatctgctgctgatcgtggacgaagccagcggatgcatgaaggggttctgcctgcgtgccaagtcggagagcgaggactgcatcaagatgtacgtcacgaaggtgcagacgcagttcggcaagaaggtcaagtttgtgcggcacgacgggtcccgtgagttcgcgaccaactcgctcaaggccttctacgaagtcgaaggcatcgagcagcaaaccacggttccgtacgcgcaccagaccaacggcacggcagaacgcgccatccggaccatcgtcacgattggccgcagcatgctgcatcacgccaagctggacaagagcttctgggctgaggcggccatgacagccatgcacgtgaagaatcgtctgccatcacccaagatcgaacacaagactccgttcgagatcgtttacaagtccaagccgagtgtgaagcacatgcgtgtgttcggatgccagacgtacatcctgacgccgaaggaaagacggcgcaagtgggaccccaaggctcgcgccgggctgttcctcggctacgaagaagtgtccaaggcgtatcgagtttatgacatcgaggcggggcaggtggttatcagtcgcgatgtcaacttcgatgagtcgacctctggacttttgacgcatacttcggatgaagacgtcgatgatgctgtgctggacttggacgcgctggacctggacgacaacgatggaccgcgccaaacgagcttcaagcaggcggggaagcgcaagtaccgaccgagtggcgacgacaacgctgccaaaagatcgcgccccgttcgccaccgagctggcttagaagaagcaagtgcgccggacgtatcctcctcgcgccgagccgaccccgacgaagaagaaaagtctggggaccaagatgaagacgacgactcgacgcctccagtgttttggcgggccagtgccaacgctgtggaagcagcagccgatctatcggagccgacgacgttccaagaggctgtgaacggtcctggtcaagtgcactggcgcaaagcgatccgcgcggagctcaagtcgatgcgactgcgtggtgtgtttcgagctgccaagttgcctaacggacaacgcgccatcgataccaagtgggtgttcaagatcaagcgcaaagcggacggctcgatcgagaagtacaaggcgcgcctcgtggccaagggcttcaagcagaagtacggcattgactacaccgagacgttctcgcccgtggtcaagtatgtgacgctgcgcatggtgatcgcgattgctaagtattttggctggcccctcgaccaactcgacgtggtgacagcattcctgtacgggataatgaaggaggtggtcttctgcgtggttccggaaggcgtcgaactggatggtgacttcgactgcctggaactggtgaaggccatctacggtctcaagcaagcttcgcgagtgtggaacgagaccttcgacgagttcgtgtgctccatcggcttccaagtgtcggccttcgatccgtgcctctacatcaaggtggtggacggtcactgcgtgcttgtactggtgtacgtggatgacgtactgattaccgggagttcgcccgagctgatcgcacgcacgaagaccgacctgaagacgcgcttcgagctgaccgacagcggcaagcgcgcgtttgttcttgggatcgagttggtggacggcccggacggcagcgtgaccatgtgccagcggcgatacgtggacgacatcctgaagcgcttcgccatggacgagtgcaaggccgtggtgagtccggtggacatgagcactcgactggttccaagcgacgcggcgaccaaggtgaacgctccgtttcgcgaagctgttggtgctctgatgcacctgatgaccgccacgcgcccagacatcgcgtacgccgttggctatgtatcgcgcttcatggagaatccccaagaggaacactgggttgcggtcaagcgtatctttcgctacctgcaaggcaccaagacgcatgggatctgcttcaagccgggcgaaaagatcgactttcgtggctactcggacgcggactgggccggcgacctcgccgaccgcaagtccacttcaggctacacgttcatgctcatgagtgcgcctgtgagctggggaagcaagaagcaatgaagcggagtacatcgcgctcagtctggctatccaagaaggcaagtggattcatcgcctgctatgcgagattctggcggccgctaattagactggacccgaactcatgatccgcgaagacaaccagtcgtgcatcaagatgacgaagaacccagtgaaccacggtcgcgccaagcacatcgacatcaagtaccaccacatccgcgatgaagtcaagcgcggcgaagtcaagctccagtactgcgagacttctgtgatgctagcggacatcatgacgaaggcgcttgcgggaccacgccacacggatctgacggtggctctcggcattcgtgggacttcgcattgagggggcgtattgagggttgctggtcttgggtactgtgtaccagttgtacccattaaccggttaacccgaaccggtccattccgaacccacgttgattatggtgattacggtaagttatttacgccaccgatgattagacgagtaggatgattggatgaacaccggtgagtgatggttgattagatgcactaggtgataggacgcagggtcgcgtgtctataacagtagggtgtaagctccaacaattcaatcactttcgaatcttcattctacccctcaagtgccttcgctccggtcccgccgtctgcgacgtccctccctccgcttcgtccgagcttcgtgtccaagatccataccttccatcagtgctccaggtattgttacagttgactttgtcgtctcaaagagtgctagagcaaatgtcctaatcaaaatatcatgttatccaaccaatcacagagcgtgaccaatcgtgttatgaatcatatcacaaacgccgtcattatatacattacggacacaaaaatttacactcctcgtcgcgtcctcagggatgctgtgatgccgccgtgcattttcagcagacgatggagcgatgcttcgattcgctgctgtacgattacattgtcatttggattgatgatctactcctatttgccgatgccatcgacatctacgtgaccaagttggaggaattcttcgacttagtggctaagtatgggctcaaacttcgcgcgaagaaaagcagcctttgccaacagtcagtgaagtggtgcgggcgcatcatcaacagtgatggtgtttcacacgacccgacttgcattgacgtgctgcgatcgatgtcgtacccgaccacagcaggccagttgcagccgtttctgtgtgtctccaactggatgcgggaatctattgttgactatgctcgtgctgtggagcctatgtagcagtgactcgacactgctctcaagagtggaaagcgcacaaagcgcgtcgctgctggcatctctgtcgcgctgacagatacagagcgggttgcatacgacaatgtgaaggacctattgactacatcagctactctagcacttccagacgactcagccaccacgtacactttcgtatcgccgcgtaaacgagatctccgttcccagcctcaacctgaagttcaccgttctgtagagcgcttttagaaatgcgtccacggcaaggttcagctggtgactcccgcaccagttgatcgtgatcgccgtgtttccaaagtgtccagcagcagcacgaaggtgagtcgagaatccctggtggcggcccagcatcgtcgcagcgccgtccgtcgagataccgatcagttgggtgagcaagttggattcaccaatgtcctcgagtagatcaatgacgagctcagcatagttctcgcctatgtgtgcgctatggccaatggggacaatggggatagcgaggaggtggatgctgtgcactttacccacaagaccaaacgactcacgcacgtccaagtatccttctttgttatgtgtcgcaccatcaaccatcagcgaaaccccccacgtcttcgtaagcagtgagctgatagcagagaggttgagagcaacgacacggcgaactgattgccccactacttgtctgcagggggctccaagtttcatgttggacagcgcagtcccgaacgtggtaaacaaaccagcaatagcgcgaaagctcactcccgcattgatgcagttgataatggtctcaaattggtctcgatcacggataatcagcacatgcccatccgacttggtctccacaaagtccgtgtagacttcaacctctcccatttcctcgtccacggccaccaagccgtgcggtgtgtcaccccgattgcagaatagacgctggatgagactggcaatttcgcgcggtacaacaaacgatatctgagggtgcctcgggaggaagctctcgatcagcgtagggagaaaaaaggttttgcgctcttcgtcctctgtgacagcttggaaggcggaccactgtcttgggtgctcacgatgcatgtgctgggtgatgtagtcgcggcagaacgacttgaataccatagcttaagacgtcttcgtccgtttcggtttcgtactcctcaccaacgcttcgaacgcggagccggtttgctcgtcctcgggatcctcccgtccaaagacctcgcagaatttgcagattgcctatacaacgtcatctcccacgcagttgaacggacgaacaccaagctccttctcatacttgagatgccagtactggcgtgttaccagcttctccttggctggcaacactaccagtacgttgttcacactacgcagacttcgagtcgcctgagttgagattgcagtcggcttgtagagaccctttcctcggcctttggatgtcccatgagctttggaagctgatgttggtggcatgggcgttggtgggtcgattgacggttggtcggcaagtttagaagtgatctacgagttcgactctgaacgctcaagcgcaaccagccaccaactcagcatgcaactcgagtttagaccgtcagatctcaacttgcatcaacatatgagcgatactactggggcaagactagttgcgacaacctagaagtgttattagccatgtacttggcctattcgtcgttgcatacatggataagctgcttcagacgatgatagcagttcaagttggcttcagttctaggattttcacggttatgaaggagcaccctaggagactttaaaaggggtatttcgttctttttctgtacacagtaccctgcatattggttccaaaacaattcggaacagccaacttcaacacgttgcacctagacaaggctgggggggggggggcagtgtagtggatgacaatctccagcctgtcgagctactagctcggagctagggctctgattgaagcaacactgatatctatgtcgacggacctacactaccaatggacaggctcgtagtgttgcccgacagcaacactgatcgtttcccacaaatagtttacctgtatcactcgtagcagaatatttggtttaccaatgttacaatagtgggcacgcgtcaccacgacagcgatgcatgcactctgcatggctcaacgcagccaagccgcccatgtacaatgccgccccgagattccgccgcttggagacgcggacgcgacaagcgcgtgatggtatacgcaccacgtgcagcagcagggggagagggggctctacgatatctacgcgcagctctacctggggggcacaggtagcactgtaaaacactagtctattactgtagtagttggtaggacactcgcccgttgtctcggtgtcgtggggaaaatatatgtggttgcaacgctcgcatacgcaacacccgccttatctgcgggtgttagcgatcggtgaatgcgcgcagtgaggctcacgcttattaacctaactgaaatgttgcgctgttggctggaggcgcattaaaagcgcttacgactgtttcaaaagaatcgcattagcttgtattcaacacgcatcgctcacgaatcgactagggcctaacgaaacgcactgggaagcgtttgctcccgcatggtacaagcaagtgtataagcaccacagaaggacatgcacatattagaataaggttaagcaggaggccgctgcaacggtcgcacatcagggagggcgcgagcgcgctacccggtagattctgaaatgagctgttgcgagccatacgtgaaattcacgcctgggaaatttacattagcgatgtgacctttttttacttagtaaaattacggttgtagtggtgctggtggacctggttgtcagtgttgcattaatgactttctctagctaacagcatcgccattggccgcagtcaatcactgcaggtgtgatggctgcggccatgcaccttactcttaacgcaaagtaagatgacaagtgctgggcataacgaaaaagctgatgcccagccagaaatcaagtggacgatgacggaaatcttgatgataaccgaactaccttacaagctagattacggctgcggcttcactggttagcaggagccgcagcgctaggagtagttcgtatccgatcactttactatttggatttggcaatacacttacagctaaaacttacgggagcatcgccgtctctcccagcgtgtcttcgacttccctgcagacactacattcaggggccgtggagtggtactccggcagttgttgtagctcgcgtgcaagctgaaggcagacagatgggtatgcacgtagggaggttgcttggttttggggtagaaagcgaaatggcacgatagttaaagccctgctcaatgatagatgtggtcctacgagtagacaaaagcgggcggcgggtcactaccatgcagaaagacaaatatcgacgcggcttcagtttaccggcctcagttaccgaggtccgaattaacccgatttgggctgcctagaagcatgacgtatcagccactgctatcccagtacgagagctatgcgtaggctgggatagctaaaacctttgtgtgagatacgttaagcgggctcactagtcgtacccgagccgctggacaggtcgtatgctcacgctgcgagttcgcacgcgagtcatctacttctcaacaccgtactggccgtcagagatcacttgatctccccctgccgggacgtccaccgtcgtgtccgctccacttttattacgaggaatagcctgaactactcctaataccaacgaatagacaccagttttcaccagcagctactctaccgtccgaactactactgcgcgtgcaccaacaccactgaccgtcctcagatctcgcactacgcgcccaggaacagcttagaccctctgtccgagtgctcacgatagcgtcgagtaccgcctgtgacccgctcgttcgtgccaataccaccctcagtcatagcaacagagcgtttcggctccgtatcgctctctccgtacacgttctcggccgcgctcgtgcagcacgtcctgttcaccttctcctacgtgctctccagcacgcacaccctggccacttgtgccaaaatcgtcgaatcttagagtgtgcgggcctctcaccgcccgctcgccgtcctgcttccgtccttcaacgtcgactcgactgcccgctggatacctgccgttgtgcgtgccactgagcggcattttgcccagtcacggtgcgtccagcgccgccgcttcgaggtacttggtctccgtcgtaccgccgaccttcgcgcagtcgcccgaatccggcatctgcgtcgcgtcgccgtccgtcaccacgtcctccgtcgctgtcacgctcatatgggtcctcctgtcgcgcccacctgttacctacgtaaggtatctccaccgcggccgcgctgcgaaaattacgagaagcaaagtcggtcgttgcacgaagaagctccaaaaaatgactactaaagtacagcatttgtgatacgtaaatctgcgttacccattgcagtgcatctcctgcgcctgcttcgcatccgcagcatccgcttaaataacttcgagcctatcaggagttgtacgtgctcgtaaacctttagtctgtcgaataccaccttctgggcacacacacgttttttttctttcacttcagcaacttacctcagcaacttagtccacgcgaccaagggttcgccgatgcctctggcagtttcctgttacatccagcttgggccgattcattgcaatacatccacggttattcattcttcggcattctactctctataccaacgcctcggggtccgctcttatagtctacgacgtcagtatttacatttctgcatgatagctagtgtgtcattctgtatattgggaactctagataaccaacaacacggttaacctttatccaccccttcagcaagttagtacatgcactgtaggtgcttgtgtgcgagggggttggagaagtgagggatcgtttgatgcatgtgttccgctgcaagtgcgcgatgtactcccttccttgtcaaataatagttgaattggctttgccgacggtctcaccgcgcgcggcgacaacctggtacgccgaccaacaacgtgcggactggtagggagcttcagcggtaagttcagctcgcacacgagtgagaactcgacgactagagaactttcgagatgttgtccatccatctcgagcctgagcttgtctcggatttgagagatggagagcatagacagtaaactttagttaccggggtcagttttctggctttagtattactggcttcagttaccgaggtgccacgtaattaacctgtgttgggctgaacctgtgttgggctggccacacatttgttgcgtttggaccggtctcggaccggttccatcctgatttatcacagagaggcaggaccgttagattagcagtcagttcggaatttgccttggaatagagattgcattcgctctcacctcggtcttgctgctgtccctgagcatggagtcagaacaacacttaacatgagcactaccataatgcaattgcactagctagttctcgtgagtagccgtgtagttgtacatgcagtacacagtgttctcataccccggagcgcagaatgggaaagacgcgtcgtcattgctgagggcgaacaagaccttgcccgacgtgtacaagaagctgttttgctacaacgtgaatgaagtgcagttgcccagatatgcatctgcctagacatcattcagcggtgtgttgctcactacagtgcttaggcgtacgcgagctatcgacatcgtatccacgcgtgacaaggtacagaggatatcgttacgtttagaaaaaatcggtggtctcgtggttttccatttgtgtgaggagtgaataccgataggctatcggcgatagcagtgttttttttcgtaagctatgcttggctgccgcactaccaatatcgataccagtctgtagcgcggttcgcacgtcagatcagcacttgctaaactacaactaaaatacgatagttagccaacatttggccagcaggaggcccagtatttggaaaaaactatcatcttttgtcgagcggccaagatgatggaccagcattaaatgctgccacattttggcgatgccgctttctgcatgtctgtgagcgacttgctgagtcagcgtgctattatccatggtaaagttaccctaactgttttgtatacagcggcccagtattaatacatgtgtaccgaaaatggatgacaccccttaagcacagttacaggcgactcgcctggtaggctggcggctcgtcggaatttaggtagagcctggcgtgctctgtaccggacggcgggactcccgccgggagtgggcaacgcccactaagcagtgcttactaagcacagaacgttataaaagtggcagaaggttgcaatacgcatgatggaatgtcgtggcccgactcgtaaatactgctttgctgttgaaagagtgcaatgctcgaatattaatactccttatctctctaggcttgtacagcgttggtgtcgagcatttttttaaaatttaaatgataaaaaataggcataaggtacggcgcaactatatatgtagtagagagtgctcagtttcagaaaacccttttcagccaattataaggcagtaatcgagccacaaatctctatgattggtcgataaaagccggcacatgaagcaaacacatggcatttcaatacaaaacccaagtaaaaatctctcgtaaactggcaccacctgcgattcgagatggcttcaaaacttacatgtttcagaaacaagtaagttttaaaaaccaagatacaatgtttgttaggtttctgtgcatcgcgtttgattggtcatcgcctacaaactgtcgaaatcgccttctttctccttgtacactgcgcgccaaaatgataggaccaccttgaaagttctcataactcggtcaatattgattattttaaggtgcggtttcgatgctagttacaaaacacgctgggaaagatcaggtatgcgctaacactcgcgtttttgcactctatgcgtgccaagtcaacacaaattaggaccacccccatcccaatacaaaatcctatataaagggaaaagttgtcgccacttcctggtggaagttgtcgccannnnnnnnnnnnnnnnnnnnnnnnnnnnnnnnnnnnnnnnnnnnnnnnnnnnnnnnnnnnnnnnnnnnnnnnnnnnnnnnnnnnnnnnnnnnnnnnnnnngatccccatccccagtcatatcgctttgtacaggctttccctttatataggattttgtattgggatgggggtggtcctaatttgtgttgacttggcagaaacagtttttttgtatgtgagctatcgcatagagtgcaaaaacgcgagtgttagcgcatacctgatctttcccagcgtgttttgtaactagcatcgaaaccgcaccttaaaataatcaatattgaccgagttatgagaactttcaaggtggtcctatcattttggcgcgcactgtaccaaaagcatggtgatacagtatctcaaaaattatcacgaagcaaaaagggcacttcgaaatcactcctatagtggcgccgtaccttaagtagtttctaggcgtgatacagacgatcctctccgtagtgatagccacgggagaccactttttatcacaatccagaggcatcactatctaaatctgtacaaaatgacggtacaatatcgtttcatggtaccagtgtagtgaaaatgcgagcttgtattgcactcgatacgtggttaaaaccctacacctttcaacttcaaaatggcaaaaagaaaattcaatacgtcaaaatgtaaaatcaaaacgacaataatttgtaaaccgatacttagacctgtttgtaatagtgggatatatagaaatacagagtgccgaatatctattggctgacagtgagctgtatcagccaatcgtgctcgtataagattgtgagacggtcctgtctctattcgtgacagtttgaacttacgttttgtcattttgaactagcaatttgccattttgaagttgaaaaggtatcgataaaagtatttgttctgcataatatttacaactatatggcacgaagcgtgacgatacgctattcactattcaaatggaactgggagcactgcacaggcagctacaacgcgacatctagtctagcaccgttgctgatgtgataaatacacgttccagaatcacaaacatgtcaaacttaataatatgtgcgcgaacccaggatctgagtcgattcacgtgtgtggtggagcccggcatgctttacgaaatggacattcacatagttaactgtctctggatagtgataaagcctaatctcgtatcacgaggatgttttgacttgaatttgtataccattggtcatcgggagagcctctattagtgctaatcagagggtatccctattcgaaatatcactccaaagaggattatctgtacagctttcgtgttcgaagactgctatatctatccatgcataacatataaaatgcatatagcagcgcgcactcggcgtaattggcatgcagtgtacggtgagtacagtattaatacatgcatcaccgtacgcgcgatggagcccgtgctgctcatatgccgcatatgatactgtactagccgagcgccgccgctacgcggcggatagaatttattaaattgttgttagttgctatgcacccgttccgctcgcctcgtcggctcgctgcactactcgctctgttaggttaataaatacagaggccggggcgggtcctgcggccccgcaatatcgtattggggggtcgccttcgctgcgctcggcagcctaggtacgattatgtggaccaccctaatttagtcgccatgcgtgacacacggactgacagacatctctctcttagttgttgtagatacgtactgtatgctgcatatgatactgtatgcgttgtcttgatagctggtgcactgatcgcggctgcacaagcgatcgcttgcacggagagtcccgagaaggcggataaacgaaggggcccgtttcagctgagcgcttctgcctcgagcgaatgctcgcccgtttaatcggtgcgagacctcccaggttggcgagtcacgtagcgcacgtgcgcaaaagttggttgtcgtgagtcgagtcagtcgaggctcggcgccttcaaaatgcatgtacatgtactgtagtcgctcgtgtacagggctgtgttggctggcgtcaagcagcgactgcgcgcgtgggcgcggctaccgagatgccgagactcgcaatcgagaaagcgtcttccggtgccctacataccatctgttggtaggtcgatctttgatgattagatttgatccggctccattcggcaacagcttttggcgacaagcccatcacgatgcggatgctctgcgagatggggccaatgtgacgggctccgaagtaatggagccccaccattttgccatgtgaacgaacgactggccccatagcgtcggacaccacctcgttcgccgtgctgctgcgctcggcggcttgactgcctgtcacctccgccggtttaacgacgtgtacgtgtcggaaattggacggggcactgatgcattgcgcgatcgctttcgctggtctacgtcggcgcagagacggccgcgcgcctgcagaccggttgcattcatgcttgccggaccggcattgccggtgcgacatacaacgacggggaattcaaggggttgtagacggaccgcggcgcgcgttgtctttcaaccaattttgcgcaaaccaaagggaaaatgctggctgttgcgcccgctctccagtcagagcaccgacacgcccgccggtgcggctccggcagagctcattgtccaatttgccgtcccaagcgacaactcctaccatggcggctccctcttctacgtcggggcgctcccccctcttcacgctcgaggactccaagatcgcgttcaacatcttctgctgcatctgcggtatcgggtcgctcggcatgccctccaactacgcacgcgccggctggggctacgccaccgtcgccctgctgttcatggccttcgccaacatttacgccacggtgctgctgtccaaggtgctgatggtggctccggcttcggtgaagacttacggtgacctcggtgaatgggttgccggcaagtggggccgtttcttcgtcgtggtctcccacatgggcgtgtgcctgctcgccccgtgcgcgttcctcgtgctgggcggcacgctgcttgacgtgctgttccccgactcgttcagccagactgtttggatcatcttcatggctgcgctcgtcatcccggtggcgctcatcccgacgctgaaggagagtgctggtatggccgtggctgggtgccttggcacgatcatcgctgatgtcattggcgttgcgattctcctgtacgaggagcgcggccaccccacgccgcccacgcccgatgtgactctccaccaggttctcaccaccttcggcaacctgtcgctggcctacgctgctgccatcgtgatccccgacctccagcgtcagcactcgcagcccgaacgcatgccgcgcgtcatcatcgtcagtcttggcctcgcctcggcctttttcctcgccatcgccatcatcggctacgtcgccggtggatgccagctttcgggcaacctgctcttctccatcgtcaacatctcggacccgtacagcaccacgaccctgggcttcactgctaaccgtggcgcggtggtcatgtcgtacctcttcatgcagctacacctgtcgattgccttctcgacgatcctgcacccggcgttcttcatggcggagcgtctcgtgctcggcatgcacaagacggaacccctcgccattgacaacgaggagcgcgaggtcgagattgaggaaaaaatgtcgtaccttgctgcgtctacgccagcgcctgccgtccccgacctcgagagcaacgcccacgagcagcgtgtgtcggtcacgaggagcgaggaagacctgtcggagtacaagggcggtgtgaacgtgattcgatatgtcctggttcgtatcgccttgattgcgatcctggcggtggcctcgattctggtgaaggaccacttcctcgacttggtggacttcactggcgccactgccatcacggtctgcagcctgatcctgccgctgatcttctacgtgaaggtgttctggagaaagatcccggtgtgggagaagaccatttgcatcacgattgccaccgtctgcggtgttgtgggctgctacgtgatgatctacgctggcaagaacctgttcaacccggacgaaggcggcgccacgttcccgtactgctcggctgagtaccaggacgagccatactacgtaaggaatagcacggcgtcgaactgaatccagcatctagtcgcatgacctattagttcccaaaatgcgttcgtatgaatatatattccacattgcatttgactcccaaagcactactactactgcttctgctcggaaaagatggagatttaacgtatgataccaaatactactacgtagtactatgcggtatactattcttgtagagtgtcctccttaaccgagtagggccctgtaccggtacactggaaacggtatttagtatcactcgtactattttgtgtgaggttgatttttccatcctcaccgcaattggtgtgagtgtgataaattacacactaatactatttagtgtgaggaacaattattaaatagtcacactcatactaatacccacctcacaaaacataatgacagacaacttgatcggaatacaacaacctgcgttgtacattctgttgtaaagagcataataagcagttgtgagaagttccgtgctcaaaatcgaacggcccgcgtttagggtgcgatattgaaagtgcaagattacattccacacaggggcatattagttattgtgacggaccaccacgatgagtaatgaataatctggcttgtacattgtaattctccttatccatacaagctagtgtcgcaaagaatttgtggtacttcgaagcgtgcgacctggggtgcaaatataaagttggatacatcttccgctctaaatccgacatcaatctattttttacttgcgattctccaccaaagcccaaagtcttgccattgtcaaaatcgatgacaaagtgtgtttcatcaatgttctcaatcacgttttcgtcgtatttgccactttcgaacccccttttaagctcacccaggtgtaccgccacgctcttttcgatctctgcagtcttttccggacttagctggcgtttcccggattgcgctcgaagtatgatgttgtgggtttccatgaacgactgcacccagcgcgtgttaatcttcttttccagcaatacgccattcgcgtccgcctttggggcatccggtcggcgcagcatacgcaacgccaactgacgtaacagtccagaatcgaacttaagtccgatcttacgaaggcggtcaagctcgctgcaaagccgaggatatatccaatccacccacgcacttcttcgccggccacgtccttttacagctttagtgttgactcgcttccttccggtatccctgcgagtcgagatactaaccgcgccacgttcgcaaaatgtctcccgctttttccaccaattgatggccttgttcaaattcgcattgcgggtggctgagatgaaaacatcgggaatctcgtcaacaacacgggcaaacatgttcttctttcctttcttcctcatgcagctttccaaccatgcaatcacgcgccggcgctgttggattgtgctgacatgctgagtagagcggcctgattcggtttccgggacctcagaaacctcggtgtcattatgggcaagtggaggttcgtccccatcctctgatttcgtctcctcattgaatgatgcaagatcaatgctatgatgttgcggacactcagtagcaccccctttgtcggcaaccttgccgcgctctttctggagagacagtgctgccacgatcggagatgctgatggcggctcctgctccttggtttggcaggccgggtacatgatgaactgaccaaaaccttcggctccaacggcagtgccgcaaaacggatgcatgtgcacaaagcacgaagggcagcgatgtattggtccggcgtcgtcaccacaccctccacatggcgccaaaaggcccgtgttagcgctcataatggcgacggcgtgctgttcgcgcggaagtcgggatgtgagagaacgtgagggaggtgcggtatagctaaatatagtatgaaaaaggtgatactaattatgaactcacactaattatgaagttcctggtggcatgttcaccataattagtgtcaccaaatggaagtgataccatttacgaactcatactattttttcacacacactaaataccgtttccagtgacagtacttcgattgtagaagtactattactgtagttcatttcccggggtacctagtagacgcggactctactaagtacttagtattgtacctttcacttcttttggcaaatcggactttggaaagtgctcgcttagagagagggctaggttattacgcctgttttgacggtgattggcaccacgaattaccctcgtactcaaaataacatcaaattttacccagtcatagcggaattctcaaatttcctccaattatacagattcatgctacactcttgtgaaggatctacggagctaccgtcttccctcgtactagatgcctaggcgttgtattcgaggttggtccacaatcccaaatcttatctcaccctcgaattgaagctatagcaaaatagaacgcctacccaatgtagcacatgttgtaaatggcatatgatgaccgaactccttgttaccaacaattctgctgtcagttggacgagccagcgcctttgtgccgactgccaaccattcgtgcggaagtcggcctctcgtttcgtcgtatcactgtacaatcgccctccagcgacacaatagcccccgctaagaatgtcagccaagaagaagcgtaatagctacagtatcggattcaagcgcagtgttgctggagagtacaagaaatgtgtcaacggctttgggtttgtcgcccttgccgcaaaacacaagataccctcgtcatcgatagttcagaagtgggttgagcagttgggcgccatgaaagacgttgcgaaggacagacagcgatcaacgcggacgacgcgtcgactgcctggtgcggattacaagcctgaataccagcagctcgaagtacagcttcatgagtgggtcgaggggcgaaacagaaagggacggcgggtctaggacaagtatgtccagctactagctctcaacatcgctcgtgactttgaagagcagcaatatcagcgtttcaaggcttcaacgggttgactggacaagtttacgacgcgctacaacctgatgttgagacgtcagacgactaccagaacattacctgctgatgccaagagtgtgtgcgaggagttcattcagaaagctcagtctctgattgagcagcatcacatcgatccatgcaacataataaacattgaccaggtcccaagatattttgaaacggaacctaattcgacgatcgcaactcgcggggccagggaggtaattttacggaaggggggagcagccacaaacgctttacagcaacgttcgcgattactggagacagtaaattcttaaagccccatgtgctgttctccaagctaaaaaatagaccaaaacttggagctatttcgaaggacatcatgattgatgttaacccaacagggatgtggaacgatcacatattgctggagcatgcagaacatgtaatttgcggtcgagcggagactcgattttatcgacagccagtgctttacatcattgattcgtatggattcgtgttattggtaccgccgaacatgacaaatctaccccaaccgctcgatgtggctctaaacaggagctttcaagctttctacaacgaccgattcaatgagtatatcgacaaagcgctgatcgatccaactttgcagacaaagcagggtaaccccaaggttcctcactaccgaacgctatctcaacaggttctggactggattgagatgaaggacaccaccgacatcaaaaaagcatttcgggtttgtggccttgttaaacgacagtcatttgatgtggaagacctccatcccccgcatcgcgagctgttggaggcgagtattgatttggatgaatgacgccgcagatacaaggctctgcttgacgaagaagctgatctagaagaggttttgcatggacctacctgagtggtatctaccgaaggagactatatcaagccttcatcgttgcctccgtttcagcctcgcaccctccatcgccgacttcatggctggacttgaataattgacgggcttacttgaccacgactacattgagtcgatcagaaacgggactgctaaatggggtgagttggagcttttttgcagcatccagattgcacagatgcagcattgaagtgaaaactttgaacgacaactgcaaagtgatttccgagttcacctacactgttcctgaggcaactgggaagatatgccttgctcgactgggccctcagtttacgttggacgtagcaggaatgcgaatatagcttagaggccacgaccaaccttctttttttttagatttacttcaatacaacgcctaccttttgcatccttcagagtttcgtagtttcacttgaatagaacgcctaggttttttattcaaatagaacgcctaggcgtcaagacggtagtcacaagctcgggaaaagcttgaatggccgacactcgcccggccattttaggttttcgtcgctacagaagagttaaagatgacctactcaattgacatgcgttggagagggatcgtgctcatgtacgtatattccatagacacagcgacagtagctagtgttctaggtctatcggtgcgtagtttacgccgctggtaccgtcgctttcgtacgacaggaaacgtactgaagaattaaccaaggaccaagacgtcaagatggccaagcgaggtgtgtgcatttgtacgatcgtatgtacaaaaccacccttgcttctacttcgaggagctgtgccccgagctgcgagctaacttccgagacacgatcagcctgtcggactcaactatctgctgagcacttcgcttcgacctcaacctaaccaggaaggtgctcacaaagcgggcacgagaatgtgtgcctagtgagcgacgtgagtatgtggctcggcttctgcccttctatagtggccccgaccagttcgtcttcattgacgaaacgtccaaggatggaaggtatatttcatacttgaagttttattactgggaattactgacctaactaaattgatgcttatcttaatactcgctagatctcttcttcgtcggtacggctggtcaacccggaatacccctgcccaagtgaccctaccgttcagtaggggaaaatctccgcccccctcccccgcaatactaaatatctaagcgccaaagtacttttgagtgtactaccagcagccaaccggcgatagacattatcagctgctttaggtaagacactcgcgcgttggcacgcgcctgcggacttagcgacggcacttcgggggggcccgcccctctctcgctttgctcggggagcgccgctgcgcggcctgccccaccccctcgtgccttacgctaagtactcggcttcggccaggcgcggtgtctggattagatattaactcctacttagacatacctcatccggcccacgcaccgaccattgcagacctccgcttcgcttcggttgcaaacggtctctctgaggcctcttagtgaattagctaggtgcatcatcaattatcatcaaggtgccatcatttggcgaaaatggtcatcgtttgtctacatttaacgaaaatgtgccatcatttggcaaaagtctgttgcgtggtcgtaacgtgtaactcggtttacctttctggtactactgaattgtgagtacacttcactgacttccgagtaatgccacaaaaatctcatttgtgacttaggaaagatatcacacccggcatcgccaccttagacgagaccgtagaaagacacaatatgcacgtatctgaggaagcaacgcattgagccatttatgcggacttgaccaactaatagagaattcgggcgatctcagaaaactaaagaataattattctaaaggtttgtagcacgttatttgagctcgtagatgacatcccaacatgcaacgccttcagagtggagtcagtagttgcctgctgacgcagagcacgagttcaaatgaagtctatgtcctcgaaagtccgagtgcatgactcctccgcacacgaaagtaaggaccacccctgttcttccagtcagcaagatgccaacccagcagcttcaacgacaactctcagttgacagggagcaactcgtgggcagagcggagtaggggcaggtgccagttaactaaccttgctatccatagctccgtgaatcagcatcagtgaactgcagcacgctcgacatttatgagcttggcccctacggacgacctaccggtaatttcatgcactaggccccttgcccttattgactggtggcccatgccattcagctatagagaattcttgagttctatttctcctttgattcgtttcaaatacaatagcgcttccttgacgtcgcttgacgtcgtactacatgtatgcccacagtgatgcaaatgcaatcactaagtacgaattagagtggtttatgtacggtactaccaaagtacttcaccatttcccaccctagtcacaaaattttcaaaccaatgacacgaggccaaacgggattttccgagaggccggagtgagttgcttgacgtggcagaaatctgcactctgattggctggttgatggattcagccccggctgcacccgtgtgacatggtgttcgccagacttcggcggtgttccgcggaacgagtgtggtgagatcgaagatgggcccttcagacttggaagctcgcgtttcaggacgagaatccctggaatcgagtgttacgtccaagtcgcccccgtcctcaagcgggttgaccctcgggatgccgaaaacgcccctgcgaatgtattgcagctggcgtcccgcctcgcttcgatagagacccacaaactacctcgcgcacccggaacaagctcaaagcctcgcaacacaagtcgcgcccgctggtcccctggaaccggatgccggaacccaagtgctgcagaatcaaggatccctgaaacgcaccctcggattcaagcctgaaaccaagcgacgatgcctgacctgatttgtacccagaagtcactgactgaagagtgggatgaaaaatccagtctacttcgaggtcggcgtatacaaccccccccaagcatactcaagtcaagatattcacgaagatcgcacgcaaggaacacggaagaacacagaagaacccagaagaagatagcctttatattgatcttagcgataatctagcagataacaatcagagagttcgttttaccccctactgcgcaagtcgagagtcactgccagccaggaatcgggtccgtcggtcgccaaggacacggtcgtcgcggagctccccaccatcatcaagtccatctgcgtggggatcttttgctcgagcgtctgaagtgatccacgcattccatatcctagttgggcccattgcgtgtaggtaagggtggtgtcccatttcatgttactgattgagcttggggagatttattagcggttgtcccctgagtgtttgactttgagactgcatttgtgagagaggattgtattggattgtgtatatttccctcgttagagggtggtgcgcgttacgagaggccccagagttgaccagtactctggaatcggcctagtcgactggcgtaagacccaccgcccaagggtcgaagaataagtggcggctgtttgttgtgtataactctgtattgtattggtttatcggaagctgggtgtattctgggatctcctcgtggacctaccagcttactcatctcgttgcgcctccggtcccctcgccattgagtagtgtgttcaagtggacgtcacgctcaactgcttaactgcctatttgtatcgccctcgcacaaacccgacgcgtccaatctgcggtcgcgacgggcaatttcccggatcttgagtagcgtatcttcgaatatagagcccaagtcttcgcaagcttcagagttgggggggggggaggttgagtggacgcttgttccttgtcttagggcgtcggttgttccttgggcgtgcggacttatcgggccggcgtttcctcggagatcccgtcgggcgtgcggcgttatcgggctggcgtttcttggggcttgttgcgtggcgttattgggccgacgcggggtcttgtgcacagcggttatcaggccgtgcggtccttcgtctaggctgcgcgttatcgagcgcctcctaaccggtatacgttttacgtgccttcgtttccagcacggggtttgaggggggggggggggggtgagtgcccgagccagcgagcgacgggggaccgcgtgttccttgcggctctgcttgccgacgcttggtgggtttcaagaacctggcgatcttccggaggggagaggtctgagtcgttcagagaaatttcgggactgagtccttaccctatcctatgtccttgctactggctactctgtactactgcttgctaagtctaccgctctgtacctatccttacttctgtcgtgcttgcactaccgtccttcaacctgatttgtgtggcgtaatcacaacttgagctcgacgggattttctcgacggggttttctcgacggggtttagggttgacgggttttagggtcgacggggtttgcacgaccgggcgaatgaaccggctcgtcgaatcagccagaattagcctgattccaccgccggtatgcgtgtcacacagcccatcaccccgttaacatttctggccattccgacgcgtcgtattccatccgacgctcgtcggctgccatctttcccggcacttcccgtcactcgttctctggcgcgacatctcgtggggtgctattccacacgtgcccggatttggggtcctcggatttcaccgagttgtttttatttgtaggaattgattagttgggcatcgttaacttctaaccagtgtttatggcgagaggacgaggcaaacaagatggagggcgtggtgatggaagtcgtggtgaggcgacgcgtcactcgcgccgcacgcaaggactgcttgcggaagagcacaaggacctggatgtcatcagctgggagaatcgtgcgcggaagaaggcagaacgggacgccaaagcggctgcagagcaagagcagaagaccaccgagaatgctgcccaagacgaccaagtgtcgacggaggcggcagaatcggccccaagttcaagctccaagcctggaggtgtcgaagaagagcaggctcaaaaccctgagtctgcgccggcatctgagggaggcgccaatgtgggtgagcccccggcggcggatcgagtttcggactctccgccgccggatcaagatgtggaagtgctcaaggtagttccagccaaggtcaaggtcgaagtgatcgagatcgaggattcggaagccgaggcggagtcagcgcttgaggatccggatgcgtcttcgcgctcgccgcagagttcgtcaaacccgcccccgtcatcgtcgcaggatcaagcctctggatccaaggtgttgccccaaggtgatgcctcgaacccggctccagcacctgaaggccagaacgcggtattgcgttcgagcccaagtccaagtgcgagcgaggtccagcttgatgagacggcggcgaagaacttcgtggctcgacaagtgtatcgctgggagctgatgcgttctggacgcgtcgttccaccttcggttgagtacgcttggccgactccgcgtccagacttcacggcctggcaagaagctaccatggtgacgtcggaatacttgcg
